United States Patent Application Publication US 2006/0150283 A1 - sequence listing, part 28

SEQ ID NO: 108032 - protein, 442 aa, Arabidopsis thaliana
  peptide (1)..(442): Ceres Seq. ID no. 13653064
MVSSRAVVMAIMVLVTVQWLVFAEGYPEEDLVARLPGQPNVGFRQFAGYVDVDSENGRSLFYYYVEAVKEPDTKPLTLWLNGGPGCSSVGGGAFTELGPFYPTGDGRGLRLNSMSWNKASNLLFVESPAGVGWSYSNRSSDYNTGDKSTVNDMLVFLLRWFNKFPELKSRDLFLTGESYAGHYIPQLADVILSYNSRSSGFKFNVKGIAIGNPLLKLDRDFAAAYEYFWSHGMISDEVRLTIMNQCDFANPKNMSNACIYAIVESSVLTEYINSYHILLDVCYPSIVQQELRLKKMNALHANRTRLPYEWTMCSNRLNYSGIDGYIDMLPSLKRIIQNQTPVWIFSGDQDSVIPLQSSRTLVRELAEDLNFKTTIPYGAWFHKEQVGGWVTEYGNLLTFATVRGAAHMVPYAEPSRALHMFSSFMNGRRLPNKPDLKSSTDD

SEQ ID NO: 108033 - protein, 434 aa, Arabidopsis thaliana
  peptide (1)..(434): Ceres Seq. ID no. 13653065
MAIMVLVTVQWLVFAEGYPEEDLVARLPGQPNVGFRQFAGYVDVDSENGRSLFYYYVEAVKEPDTKPLTLWLNGGPGCSSVGGGAFTELGPFYPTGDGRGLRLNSMSWNKASNLLFVESPAGVGWSYSNRSSDYNTGDKSTVNDMLVFLLRWFNKFPELKSRDLFLTGESYAGHYIPQLADVILSYNSRSSGFKFNVKGIAIGNPLLKLDRDFAAAYEYFWSHGMISDEVRLTIMNQCDFANPKNMSNACIYAIVESSVLTEYINSYHILLDVCYPSIVQQELRLKKMNALHANRTRLPYEWTMCSNRLNYSGIDGYIDMLPSLKRIIQNQTPVWIFSGDQDSVIPLQSSRTLVRELAEDLNFKTTIPYGAWFHKEQVGGWVTEYGNLLTFATVRGAAHMVPYAEPSRALHMFSSFMNGRRLPNKPDLKSSTDD

SEQ ID NO: 108034 - protein, 431 aa, Arabidopsis thaliana
  peptide (1)..(431): Ceres Seq. ID no. 13653066
MVLVTVQWLVFAEGYPEEDLVARLPGQPNVGFRQFAGYVDVDSENGRSLFYYYVEAVKEPDTKPLTLWLNGGPGCSSVGGGAFTELGPFYPTGDGRGLRLNSMSWNKASNLLFVESPAGVGWSYSNRSSDYNTGDKSTVNDMLVFLLRWFNKFPELKSRDLFLTGESYAGHYIPQLADVILSYNSRSSGFKFNVKGIAIGNPLLKLDRDFAAAYEYFWSHGMISDEVRLTIMNQCDFANPKNMSNACIYAIVESSVLTEYINSYHILLDVCYPSIVQQELRLKKMNALHANRTRLPYEWTMCSNRLNYSGIDGYIDMLPSLKRIIQNQTPVWIFSGDQDSVIPLQSSRTLVRELAEDLNFKTTIPYGAWFHKEQVGGWVTEYGNLLTFATVRGAAHMVPYAEPSRALHMFSSFMNGRRLPNKPDLKSSTDD

SEQ ID NO: 108035 - DNA, 1340 bp, Arabidopsis thaliana
  misc_feature (1)..(1340): Ceres Seq. ID no. 13653067
  misc_feature (1)..(1340): Ortholog of  Ceres SEQ ID NO 15170659 as cited in SEQ ID NO 67270
gaatcgtgtgagaagagagactgaagaagagctacaaaaaatgagagagctcctgtgaagtgacgaagagacgaagaagaaagagaacattaatggcggctactccgtggtactttgtcgcagtacttctcaccattcttaccagctctcaggggattctaacaactctttctcaaagtgatggaggttataagtatgattatgctactgttccctttcttgctgaagtttttaagctgatcatttctggtttatttctctggagagagatgcggacatcttcctcaacaacttcaaggattactacggattggaagagtgtgcgattatttgttattccgtctcttatttatctgatacataacaatgtgcagtttgctacattgacttatgtggatacgtccacttatcagataatgggtaatttgaagattgtgaccactggcatactgtttaggttatttttgaaaaggaaactatctaaacttcagtggatggcaattggtcttttagctgttggaacaactaccagccaggttaagggttgtggagaagcttcttgtgattctttattcacggcaccaatacaaggttatttgctgggcatcctctcagctggtttgtccgcgctagctggaatctacacagagtttctgatgaagagaaacaatgacaccttatactggcaaaacttgcagttatatacgtaggtttggttcacttttcaacgtagctcgacttatagcagatgatttcagacacgggtttgaaaagggtccttggtggcaacgtatctttgatgggtacagcatcaccacttggctggtagttctgaatctcggatccactggcttactggtctcgtggttaatgaagtatgcagacaacatcgtcaaggtttattctacatcaatggcgatgctacttactatggttgcatccatatacctttttagcttcaaaccgacactgcagcttttcttgggtattgtcatatgcatcatgtcactccatatgtactttgctcctccacacacgctcgtggacttgcccgtgacaaacgaagcacatgccaagaccttaaagcaagttgtcgtagaagaaaagacagattcttgaattaaattggacgaaaaggttagttgaacacatagaaaacaatttgctaagtaaatgaacacaatgatcttcttctagcttcatttctattagagaatgagaaacttggatgtgagttcttttgaagaaatgatctgatagtttgtttattcacgtaccgattcttttctttgtaaatgtacatcgaggtgcctagaaatagtaaattcgattgttgaagc

SEQ ID NO: 108036 - protein, 205 aa, Arabidopsis thaliana; identical to SEQ ID NO: 24044
  peptide (1)..(205): Ceres Seq. ID no. 13653068

SEQ ID NO: 108037 - protein, 149 aa, Arabidopsis thaliana
  peptide (1)..(149): Ceres Seq. ID no. 13653069
MTPYTGKTCSYIRRFGSLFNVARLIADDFRHGFEKGPWWQRIFDGYSITTWLVVLNLGSTGLLVSWLMKYADNIVKVYSTSMAMLLTMVASIYLFSFKPTLQLFLGIVICIMSLHMYFAPPHTLVDLPVTNEAHAKTLKQVVVEEKTDS

SEQ ID NO: 108038 - protein, 146 aa, Arabidopsis thaliana; identical to SEQ ID NO: 24046
  peptide (1)..(146): Ceres Seq. ID no. 13653070

SEQ ID NO: 108039 - DNA, 2064 bp, Arabidopsis thaliana
  misc_feature (1)..(2064): Ceres Seq. ID no. 13653082
  misc_feature (1)..(2064): Ortholog of  Ceres SEQ ID NO 14314252 as cited in SEQ ID NO 57492
  misc_feature (1)..(2064): Ortholog of  Ceres SEQ ID NO 12608276 as cited in SEQ ID NO 57871
  misc_feature (1)..(2064): Ortholog of  Ceres SEQ ID NO 13598492 as cited in SEQ ID NO 63882
  misc_feature (1)..(2064): Ortholog of  Ceres SEQ ID NO 13657914 as cited in SEQ ID NO 66230
  misc_feature (1)..(2064): Ortholog of  Ceres SEQ ID NO 13595877 as cited in SEQ ID NO 67702
  misc_feature (1)..(2064): Ortholog of  Ceres SEQ ID NO 13622667 as cited in SEQ ID NO 0
actcatcacttacttaacatactaagagagttattacaacttgaaaaacatggcatccaaggctttgattctgttgggtctcttcgcaattcttctggtggtctccgaagtttctgccgcaagacagtcgggcatggtgaagccagagagtgaggcaactgtgcaacctgaaggttatcacggaggacatggtggtcacggagggggaggccactacggaggaggaggccacgggcatggaggacacaacggaggagggggccacggacttgacggatacggaggaggacatggaggacactacggaggaggaggaggacactacggaggaggaggaggccacggtggtggtggacactacggaggtggaggacaccatggaggaggaggccacgggcttaacgaacctgttcagacgaaaccgggtgtttaaaagttaaaactataaaataaattcaccaccagtccaccatgcataattgcatctctatatacacttatgtcttataagtatgcatcaaaataaaccatggtgagtttgtaatgcagttccttcagaaaaaaaaaaaaaacaatccagggttggatccaacctggatagtttttttttttttttttatgtaaatttggtccgtcgattgcagttcaattaaacagttacagacaatagagagacagatagagagtaacaaaactcaagaagagcgtttggcatttgaacagagattgttccagagatagcgaccacttgccatgtcaacgcatgtccaaaatccagacttcattgccattcccaccttggagaatccagagactgaatcgtcgtcggcgtgttcagcgtcggtgaaggaatcatcgagaggatcgtcagaggtagagttgagcttctggaggacgaagaagccagcgagagtcgctgaaaggaatatgaggataagccttaacggacacatctgcttcttcttctcttttcttgatttgctttttccagtttttgatgaagacaatcagcggttctcgagaaccgatggaatcaacaaagaagcaagtctcgttggagctacttccatggttagttgtccacaccgatggaacggtagagagactagcgggaaccgaggtttgtcctcccggtttggatccaataaccggggttttctctaaagatatcattatcgaaccgaaaaccggtttatctgcccgaatctatcgacccttctcgattcaacccggtcagaagattcctctcatgctctattttcatggcggtgcatttctcatctcctccacttccttcccctcttaccacaccagtcttaacaaaattgtcaatcaggctaacgtcatagccgtctctgtcaattacagactagcaccagaacatccacttcctacagcgtacgaagactcatggactgcgctaaagaatatccaagccataaacgagccgtggatcaacgactacgccgacttggacagtttattcctagtgggagatagcgcgggagctaatatctcgcaccacctcgcatttcgagccaaacaatctgaccaaaccttgaaaatcaaaggcattggaatgatccacccatatttttgggggacacaacctatcggagcagagatcaaagacgaagcgaggaaacaaatggtggacggatggtgggaattcgtgtgcccatccgagaaaggatccgatgacccgtggattaatccgtttgcggacgggtcaccggatcttggagggttagggtgtgagagagtgatgattactgtggcggagaaagatatattgaatgagagagggaagatgtattacgaaagattggtgaagagtgagtggaaaggaaaggttgagattatggagacgaaagagaaagatcatgtttttcatattttcgagccagattgtgatgaagctatggagatggtacgatgcttggctctctttataaaccaagttgaagcttgatattatttgttttgccaaaatttgatggctttttttaatgtttgtataatttttacatgtttgttaatgttgttgttattgtcttttctttt

SEQ ID NO: 108040 - protein, 324 aa, Arabidopsis thaliana
  peptide (1)..(324): Ceres Seq. ID no. 13653083
MKTISGSREPMESTKKQVSLELLPWLVVHTDGTVERLAGTEVCPPGLDPITGVFSKDIIIEPKTGLSARIYRPFSIQPGQKIPLMLYFHGGAFLISSTSFPSYHTSLNKIVNQANVIAVSVNYRLAPEHPLPTAYEDSWTALKNIQAINEPWINDYADLDSLFLVGDSAGANISHHLAFRAKQSDQTLKIKGIGMIHPYFWGTQPIGAEIKDEARKQMVDGWWEFVCPSEKGSDDPWINPFADGSPDLGGLGCERVMITVAEKDILNERGKMYYERLVKSEWKGKVEIMETKEKDHVFHIFEPDCDEAMEMVRCLALFINQVEA

SEQ ID NO: 108041 - protein, 314 aa, Arabidopsis thaliana; identical to SEQ ID NO: 102772
  peptide (1)..(314): Ceres Seq. ID no. 13653084

SEQ ID NO: 108042 - protein, 240 aa, Arabidopsis thaliana; identical to SEQ ID NO: 102773
  peptide (1)..(240): Ceres Seq. ID no. 13653085

SEQ ID NO: 108043 - DNA, 794 bp, Arabidopsis thaliana
  misc_feature (1)..(794): Ceres Seq. ID no. 13653094
  misc_feature (1)..(794): Ortholog of  Ceres SEQ ID NO 14316118 as cited in SEQ ID NO 52391
  misc_feature (1)..(794): Ortholog of  Ceres SEQ ID NO 13664032 as cited in SEQ ID NO 67527
aatttctctaaagccctaaaactaaaacgactatccccaattccaagttctagggtttccatcttccccaatctagtataaatggcggatacgccttcgagcccagctggagatggcggagaaagcggcggttccgttagggagcaggatcgataccttcctatagctaatatcagcaggatcatgaagaaagcgttgcctcctaatggtaagattggaaaagatgctaaggatacagttcaggaatgcgtctctgagttcatcagcttcatcactagcgaggccagtgataagtgtcaaaaagagaaaaggaaaactgtgaatggtgatgatttgttgtgggcaatggcaacattaggatttgaggattacctggaacctctaaagatatacctagcgaggtacagggagttggagggtgataataagggatcaggaaagagtggagatggatcaaatagagatgctggtggcggtgtttctggtgaagaaatgccgagctggtaaaagaagttgcaagtagtgattaagaacaatcgccaaatgatcaagtaattcttctctctatcacacggcctcatgtacacaaatgaagagcatagtctatatgcatgggaaattagagatcagtgagttgtttatagttgagctgatcgacaactatttcgggtttactctcaatttcggttatgttagtttgaacgtttggtttattgtttccggtttagttggttgtatttaaagatttctctgttagatgttgagaacacttgaatgaaggaaaaatttgtcct

SEQ ID NO: 108044 - protein, 141 aa, Arabidopsis thaliana; identical to SEQ ID NO: 27889
  peptide (1)..(141): Ceres Seq. ID no. 13653095

SEQ ID NO: 108045 - protein, 107 aa, Arabidopsis thaliana; identical to SEQ ID NO: 27890
  peptide (1)..(107): Ceres Seq. ID no. 13653096

SEQ ID NO: 108046 - DNA, 1556 bp, Arabidopsis thaliana
  misc_feature (1)..(1556): Ceres Seq. ID no. 13653114
  misc_feature (1)..(1556): Ortholog of  Ceres SEQ ID NO 14306569 as cited in SEQ ID NO 53008
actctcttcagacaaaacccacgagatacagaaaaagaggacaagagagaatcgtccatggaagaagacactggtatcgacgaagctaagacatacacggtggagaagagcgagaaagtggagccggagaaggacggactgagtcaattcagagacgaggaaaaatcacttggtgcggatatggaagatttacatgatgagactgtgcgagaaaccctaggcaaggatcaggttcaaggtgttcgagaaaattcctctgtggaaccaaatgttgaagatgtattagaagtgaatgagactgatagcgtcaaggaaactgttgtaagtgcgattgtgccggttgatgaagtggaagagaatcgtcaggtagaaacatctccttctctggctgcatcgtcagactcattgacagtgacgccatgtctatctttggatcctgcaactgcttcaaccgcacaagatttaccactggtttcagttccaactaaacaagagcaaagatcagattcgccggtggttaacagattgtcggttactcctgttcctaggacaccggctcgtgatggttataattggagaaaatatggacagaagcaggttaagagtcccaagggctcacggagttactacaggtgtacatacactgaatgttgtgctaaaaaaattgaatgctccaatgattcaggcaatgtggtagagattgttaacaaaggtttacatactcatgaacctccccggaagactagcttctccccgagagagattagagttacaacagctatccggcctgtttcagaggatgatacagtagtagaagagctatcaattgttcctagcggttcagatccgtctgcttctactaaagaatacatctgtgagtcgcaaacactcgttgaccggaaaagacactgtgagaacgaagctgtggaggaaccagagccaaaacgaagactgaaaaaagataactcacagagttcagattctgtctccaaacctggaaagaaaaacaaattcgtagtacacgcagctggtgatgttggtatctgtggtgatggatacaggtggcgtaaatacgggcagaaaatggtgaaaggaaatcctcatccaaggaactactaccgatgcacttcagcgggatgtccagttcgtaaacacattgagacagcagtcgagaacacaaaagcagtaataatcacatacaaaggagtacacaaccacgacatgccggtgcctaagaaacgccatggtcctccaagctcaatgctcgtagctgcagccgctccaacatcaatgagaaccaggacagacgatcaggtgaacattccgacttcaagccagtgctcggtggggcgagaaagtgagaagcagagtaaagaagcattggacgttggtggagagaaagtgatggaatcagctaggactttgttgagcattggattcgaaatcaagcaatgctgattatatgtagtttatgagttttatagagttcatcgactcaattttcgcctccttgttcttgttatataataataataaaaaaccccatgaagattacc

SEQ ID NO: 108047 - protein, 485 aa, Arabidopsis thaliana
  peptide (1)..(485): Ceres Seq. ID no. 13653115
TLFRQNPRDTEKEDKRESSMEEDTGIDEAKTYTVEKSEKVEPEKDGLSQFRDEEKSLGADMEDLHDETVRETLGKDQVQGVRENSSVEPNVEDVLEVNETDSVKETVVSAIVPVDEVEENRQVETSPSLAASSDSLTVTPCLSLDPATASTAQDLPLVSVPTKQEQRSDSPVVNRLSVTPVPRTPARDGYNWRKYGQKQVKSPKGSRSYYRCTYTECCAKKIECSNDSGNVVEIVNKGLHTHEPPRKTSFSPREIRVTTAIRPVSEDDTVVEELSIVPSGSDPSASTKEYICESQTLVDRKRHCENEAVEEPEPKRRLKKDNSQSSDSVSKPGKKNKFVVHAAGDVGICGDGYRWRKYGQKMVKGNPHPRNYYRCTSAGCPVRKHIETAVENTKAVIITYKGVHNHDMPVPKKRHGPPSSMLVAAAAPTSMRTRTDDQVNIPTSSQCSVGRESEKQSKEALDVGGEKVMESARTLLSIGFEIKQC

SEQ ID NO: 108048 - protein, 466 aa, Arabidopsis thaliana
  peptide (1)..(466): Ceres Seq. ID no. 13653116
MEEDTGIDEAKTYTVEKSEKVEPEKDGLSQFRDEEKSLGADMEDLHDETVRETLGKDQVQGVRENSSVEPNVEDVLEVNETDSVKETVVSAIVPVDEVEENRQVETSPSLAASSDSLTVTPCLSLDPATASTAQDLPLVSVPTKQEQRSDSPVVNRLSVTPVPRTPARDGYNWRKYGQKQVKSPKGSRSYYRCTYTECCAKKIECSNDSGNVVEIVNKGLHTHEPPRKTSFSPREIRVTTAIRPVSEDDTVVEELSIVPSGSDPSASTKEYICESQTLVDRKRHCENEAVEEPEPKRRLKKDNSQSSDSVSKPGKKNKFVVHAAGDVGICGDGYRWRKYGQKMVKGNPHPRNYYRCTSAGCPVRKHIETAVENTKAVIITYKGVHNHDMPVPKKRHGPPSSMLVAAAAPTSMRTRTDDQVNIPTSSQCSVGRESEKQSKEALDVGGEKVMESARTLLSIGFEIKQC

SEQ ID NO: 108049 - protein, 425 aa, Arabidopsis thaliana
  peptide (1)..(425): Ceres Seq. ID no. 13653117
MEDLHDETVRETLGKDQVQGVRENSSVEPNVEDVLEVNETDSVKETVVSAIVPVDEVEENRQVETSPSLAASSDSLTVTPCLSLDPATASTAQDLPLVSVPTKQEQRSDSPVVNRLSVTPVPRTPARDGYNWRKYGQKQVKSPKGSRSYYRCTYTECCAKKIECSNDSGNVVEIVNKGLHTHEPPRKTSFSPREIRVTTAIRPVSEDDTVVEELSIVPSGSDPSASTKEYICESQTLVDRKRHCENEAVEEPEPKRRLKKDNSQSSDSVSKPGKKNKFVVHAAGDVGICGDGYRWRKYGQKMVKGNPHPRNYYRCTSAGCPVRKHIETAVENTKAVIITYKGVHNHDMPVPKKRHGPPSSMLVAAAAPTSMRTRTDDQVNIPTSSQCSVGRESEKQSKEALDVGGEKVMESARTLLSIGFEIKQC

SEQ ID NO: 108050 - DNA, 980 bp, Arabidopsis thaliana
  misc_feature (1)..(980): Ceres Seq. ID no. 13653118
  misc_feature (1)..(980): Ortholog of  Ceres SEQ ID NO 15179607 as cited in SEQ ID NO 0
gttcacatcgttttcgttttgtccccaaaaccctaaaaatcttcaacgcagggtttaacgaatcaaacctcaacgacgtcgttttactcttcttcttcttcctctctgtgttgcgttccctctttcacaaactcactgacatcacatccttagagtcgtcccagaatgaactcactcgccattagagtctccaaggttctcagatcctcttcaatatctcctttagcaataagtgctgagagaggctctaagtcgtggttctctactggtcctatcgatgaaggtgtagaagaagattttgaagaaaatgttacagaaaggcctgagcttcaacctcatggagttgatcctcgtaaaggttggggatttcgcggtgttcatagggcgattatttgtgggaaagtagggcaagcaccgttacagaagatcttaaggaacgggcggacagtaacgatctttacagtaggaacaggtgggatgtttgatcagaggcttgtaggagctactaatcagccaaaaccagctcagtggcatagaatcgctgtgcacaacgaagtgcttggctcttacgctgtccaaaaactcgctaaaaactcgtcggtttatgtggaaggtgatattgagactagagtgtataatgatagcatcagcagtgaagtgaagagtatccctgagatttgcgttcgtcgtgatggtaagattcggatgatcaaatatggtgaaagcattagcaaaatctcttttgatgagctaaaagaaggattgatttagtcggagcaagaatattccggtgaccggatgagagcaaactgaataaaacgtttttctgagtaaaatcgataaaacagtttggttttttgttctgtccattgcgactttgtgagcactgagttccttttaatggataccagggggcatatttatgtagtttctggtcagaattatttgatgtattgttcttcagtggatgtttatatggc

SEQ ID NO: 108051 - protein, 201 aa, Arabidopsis thaliana
  peptide (1)..(201): Ceres Seq. ID no. 13653119
MNSLAIRVSKVLRSSSISPLAISAERGSKSWFSTGPIDEGVEEDFEENVTERPELQPHGVDPRKGWGFRGVHRAIICGKVGQAPLQKILRNGRTVTIFTVGTGGMFDQRLVGATNQPKPAQWHRIAVHNEVLGSYAVQKLAKNSSVYVEGDIETRVYNDSISSEVKSIPEICVRRDGKIRMIKYGESISKISFDELKEGLI

SEQ ID NO: 108052 - DNA, 2385 bp, Arabidopsis thaliana
  misc_feature (1)..(2385): Ceres Seq. ID no. 13653120
  misc_feature (1)..(2385): Ortholog of  Ceres SEQ ID NO 13646680 as cited in SEQ ID NO 20737
attgaaatctccaccttcttcttcttcagtaaccgatccactctcttcgtcttcttcttcttcttcttttagtgcttcgtttttgttttccgggaggcgaagttggagtagaacgacccagttagtataaacctcgccggaaatggatacaccagataagaaccgcatctccgccgtttccttctgcaacttcgaggattctccagtttttcaatatattaatgatctctctccaatagagccagtgaagccaggacgcccagagaatatcttgcactcactggtttttacatctccatcatcatcatcatctctattttgttccccgcagttaaactcttaccgagattccagatttttcatcaaaaggcatcgttctctagatctatcgagtccagtagtcctcatcggtgagactctaaaaaactcaccagatgctttatgggaggagaagctaaagtgtaggcctgagaagttggaaaatgtttctgaacccaagccatttaaggagcagataagcttagcaattgagttggcgaattcattgaaacacggaagagatggatgtgatattcagatggtttcttgtgatgaagtacctatggatgctgatgatgaaataggaagcggtggtggatccagagagctgtctgatgagttatgtagacagtcttttgatccacttgactttgatgctgattcagatggagtacttcacactgatgaaatggaagctgagagtgggtttggtaaagaagtaataatgtttgatgttgctgatatccagaactatgagcaacagattccaaggaccacagatcctagattttattctcttgcttctgagcctcaacagttttctatctactgtaataactcaaattatgtcgaagagcgggaaggttcgtgcagtgtacaagttgcagctggagctccagacattaatctcagttgttcctccaaggtagcagctattgattcaactgccgaagctgaagacaaggaagataaagaccttcagcccagtggcaagcaacgaagtgtacgcaggcgctgcttaacttttgacatgggagggtctcacaaaaggatacctttgcgtgattctacaaatgatcttcctcttgattctacctctatcaataaagctcccagtccacaaaattgtttagacaccagtaaacaagacactgatgagattctacccattccacgaacgattggcctgcacttgaatggtttcgtgaacccctcagtctcaagtggccgaaaaaaaaaaaaaatcaaagatggtcaggcttttccttctacaacatttcattataatattgaagatgaattctcaactcctgtctccacaaaaagagatttggtggtattcagtgatgtcaaaatcatggagcctcctgagagatcagtggaaggagaatgttttgaccaactcatggcaatggaaaataggcaattgtctcaaggacttgacgaacttggcagctgtaagcgctgtaaatgtaggaaatcacaatgcttgaagctgtattgtgaatgtttttccgctggtctattctgtggtgaaccttgttcatgtcaaaattgtttcaataagcccattcatgaagacctagttatgaaaagtcgtgaagtgattaaagcccgcaacccattagcttttgctccaaaagtggtctcaacttctgatactgttatagatttatgggtcgagaacagcaagactcctgcttcagcaagacacaaaagaggatgcaactgcaggaaatcaggctgctcaaagaaatattgtgaatgctttatgatgggcgttggatgctcctctaactgcagatgcatgggatgcaagaatacttttggtcacacaaatgagcaatgtgcgggagattctgatgtggtaacaatcaatgatgaagctaaacactatggtgatcatggcgatgcttcaaggcaaaacgaagaaatcttaaccagtgagagaaaccgcttgttgctccctggttctgtagcattccgttccttaacatcactgtcaaacctgtctgaactttgagactgactactcagaagcaccatctgaagaaccaggagactcctgttatgttatcaatcacgcacgactcaatcaatcaaaaccaccgtatgaaagctctgtgtctgctgttgctcgaatgggttttgtttgatctaccttaatctcactttcatcttgttatttccaagtctagttttggtgggtatatattacaaatatatgtattggaagatttttgcttagggtgtgaatgtgtgttacctgttttgctctgctagtttataatgttttagtgtttgtttttcactgaagaaagttttgtagtggtgttgtttgtctcc

SEQ ID NO: 108053 - protein, 639 aa, Arabidopsis thaliana
  peptide (1)..(639): Ceres Seq. ID no. 13653121
MDTPDKNRISAVSFCNFEDSPVFQYINDLSPIEPVKPGRPENILHSLVFTSPSSSSSLFCSPQLNSYRDSRFFIKRHRSLDLSSPVVLIGETLKNSPDALWEEKLKCRPEKLENVSEPKPFKEQISLAIELANSLKHGRDGCDIQMVSCDEVPMDADDEIGSGGGSRELSDELCRQSFDPLDFDADSDGVLHTDEMEAESGFGKEVIMFDVADIQNYEQQIPRTTDPRFYSLASEPQQFSIYCNNSNYVEEREGSCSVQVAAGAPDINLSCSSKVAAIDSTAEAEDKEDKDLQPSGKQRSVRRRCLTFDMGGSHKRIPLRDSTNDLPLDSTSINKAPSPQNCLDTSKQDTDEILPIPRTIGLHLNGFVNPSVSSGRKKKKIKDGQAFPSTTFHYNIEDEFSTPVSTKRDLVVFSDVKIMEPPERSVEGECFDQLMAMENRQLSQGLDELGSCKRCKCRKSQCLKLYCECFSAGLFCGEPCSCQNCFNKPIHEDLVMKSREVIKARNPLAFAPKVVSTSDTVIDLWVENSKTPASARHKRGCNCRKSGCSKKYCECFMMGVGCSSNCRCMGCKNTFGHTNEQCAGDSDVVTINDEAKHYGDHGDASRQNEEILTSERNRLLLPGSVAFRSLTSLSNLSEL

SEQ ID NO: 108054 - protein, 494 aa, Arabidopsis thaliana
  peptide (1)..(494): Ceres Seq. ID no. 13653122
MVSCDEVPMDADDEIGSGGGSRELSDELCRQSFDPLDFDADSDGVLHTDEMEAESGFGKEVIMFDVADIQNYEQQIPRTTDPRFYSLASEPQQFSIYCNNSNYVEEREGSCSVQVAAGAPDINLSCSSKVAAIDSTAEAEDKEDKDLQPSGKQRSVRRRCLTFDMGGSHKRIPLRDSTNDLPLDSTSINKAPSPQNCLDTSKQDTDEILPIPRTIGLHLNGFVNPSVSSGRKKKKIKDGQAFPSTTFHYNIEDEFSTPVSTKRDLVVFSDVKIMEPPERSVEGECFDQLMAMENRQLSQGLDELGSCKRCKCRKSQCLKLYCECFSAGLFCGEPCSCQNCFNKPIHEDLVMKSREVIKARNPLAFAPKVVSTSDTVIDLWVENSKTPASARHKRGCNCRKSGCSKKYCECFMMGVGCSSNCRCMGCKNTFGHTNEQCAGDSDVVTINDEAKHYGDHGDASRQNEEILTSERNRLLLPGSVAFRSLTSLSNLSEL

SEQ ID NO: 108055 - protein, 486 aa, Arabidopsis thaliana
  peptide (1)..(486): Ceres Seq. ID no. 13653123
MDADDEIGSGGGSRELSDELCRQSFDPLDFDADSDGVLHTDEMEAESGFGKEVIMFDVADIQNYEQQIPRTTDPRFYSLASEPQQFSIYCNNSNYVEEREGSCSVQVAAGAPDINLSCSSKVAAIDSTAEAEDKEDKDLQPSGKQRSVRRRCLTFDMGGSHKRIPLRDSTNDLPLDSTSINKAPSPQNCLDTSKQDTDEILPIPRTIGLHLNGFVNPSVSSGRKKKKIKDGQAFPSTTFHYNIEDEFSTPVSTKRDLVVFSDVKIMEPPERSVEGECFDQLMAMENRQLSQGLDELGSCKRCKCRKSQCLKLYCECFSAGLFCGEPCSCQNCFNKPIHEDLVMKSREVIKARNPLAFAPKVVSTSDTVIDLWVENSKTPASARHKRGCNCRKSGCSKKYCECFMMGVGCSSNCRCMGCKNTFGHTNEQCAGDSDVVTINDEAKHYGDHGDASRQNEEILTSERNRLLLPGSVAFRSLTSLSNLSEL

SEQ ID NO: 108056 - DNA, 2594 bp, Arabidopsis thaliana
  misc_feature (1)..(2594): Ceres Seq. ID no. 13653128
  misc_feature (1)..(2594): Ortholog of  Ceres SEQ ID NO 13661594 as cited in SEQ ID NO 61098
ataacaacaagtgatacattctcaatctctgattcttctgattctcaaaaccctaatttccacacgctttctatcatttccacccaaaagagagagatatgacggagacgacgaaggtgatgtacatagtggtggtcgatggaacggatacggcggagacggtggaagaagacgggaccgggacttggaaagattcgtttaggtatacacgtcctgttttgcagagtactcttcagcttatgggatgcaaagcccgtcacgccttcaagattagccgcagggtgtttgagttaataagaagtgagggatctttaatcctttctccctcgctttcgccctcgcatagtaaagaatctgaatttcagaagacaggtgatgcttcagcttgtgctaatgtagaaaaggctaacaaagttaacagtttggctactgatgatgttgataagagtaaaagtaagccgtttgaggtgtacaaaaggcgaacaaccgttgttgtttctcgtgaaatatttgtaaacgttgtctgtgatgccctggctgagtacaagtatgtgggtcatgaccaaagggcagacttgattctgtcgtgcagaatccgagaaaggaaagaatctgtgactgttctactgtgcggtactagtggctgtggcaaatctacactctccgcacttctgggaagtaggcttgggattacaacggtggtctcaaccgactcaatccgtcacatgatgaggagtttcgttgatgaaaagcagaatcctttgctatgggcttcaacataccatgctggagagtaccttgaccctgtggcagttgctgagtcaaaagccagaagaagaagagccaaaaaaatggatagtattgaggacgaaaaagcgaaagcctctgaaggtgggaaggctaagaatactcaacagactgatgttggatcaacaaaaaacacccctgtattgttaagtcccaagcaaatggctgtagaaggatttaaggctcaaagtgaaatggttattgacaatctcgataggctcattaccgcatgggaagaaaggaaagagtctgttattgttgaaggtgtccatttaagcctcaactttgtgatgggactgatgaaaaagcatccttctatagttcctttcatggtatacatcgcaaacgaggagaaacatttggaacgatttgcagttagagctaagtacatgaccctggacccagagaaaaacaagtatgtaaaatatatacgtaacatcagaacaatacaggattacttgtgtaaacgagctgacaaacatctcgtccccaagataaacaataccaatgtcgacaagagtgtggctgcgatccacgctacagtcttcagttgcctgcgtaggcgagaagcaggagagcatctctatgatgctactacaaatactgtctcagtgattgacgatgagtatagaaaccagtgtacagctaattcattgagctccaaaggaatgtttcagctgatccaaagaaaaggttcttctaggcatcttatggctcttctcaatactgatggcactttcgcaagaacttggcccgttactggtaaggtcgatgagagtggaaagccagtcttttgtaatgagatgattgaagaaaatggaatggagcacccggtctatggatacctacagaaagctgaaccggtgaatcttcagtttggtctatttgggatcagtgcttggcctagtgatggagccactagccgcgctgggagtgtagatgactgtaaagctgacatggctgaaaccagcagtcggtattactcttcttgctgcagctcgcctaggatgtctgaaggaacttctaaagagcttaaggaggatcagtcagtccatgggagcgatgaagaagtcgaggatgatcctcccgagccagatacagattttagcgatgacgataacaagcgagaccatgacgaggtgggttcggttgatgagcaatcaacaaagtcagatgaggagtacgatgatcttgctatggaagacaaaagctactggacagatgaagaggaagagtcacgagatacgattgcaataatgtctgaaaaaaacaacaagcaagcaacaaaagaagacaagtacatacagaacttagacctttttctacggaccgcaaaccagcagcttgtcgagccacttcagctatgtgcatcactgctcacatgcgagaatgggaacacaagactctggttgggtaaagaaaagatgaggaaacgttctttaagcatctcggccattggcaaacatgggtcgggtttgggtgatgcgattctcttgggtgccccatgaggccatgatcttttactttagtttgatatttctctggtgtagtcttttttttatttcttgataaagtattctggttctggtctttagtttaagttttctgtgtgtgtatgtgtgactgtgtgaatagtcttaacttgcacaaatttgggggtttataaagtgcttcgttttcttttctttttttatttaaggcttttcttttcttcgacctcaaatgtaaatacttcaatattaacatctaagactccagtttaaatttctatataattgagcgtttgc

SEQ ID NO: 108057 - protein, 738 aa, Arabidopsis thaliana
  peptide (1)..(738): Ceres Seq. ID no. 13653129
MTETTKVMYIVVVDGTDTAETVEEDGTGTWKDSFRYTRPVLQSTLQLMGCKARHAFKISRRVFELIRSEGSLILSPSLSPSHSKESEFQKTGDASACANVEKANKVNSLATDDVDKSKSKPFEVYKRRTTVVVSREIFVNVVCDALAEYKYVGHDQRADLILSCRIRERKESVTVLLCGTSGCGKSTLSALLGSRLGITTVVSTDSIRHMMRSFVDEKQNPLLWASTYHAGEYLDPVAVAESKARRRRAKKMDSIEDEKAKASEGGKAKNTQQTDVGSTKNTPVLLSPKQMAVEGFKAQSEMVIDNLDRLITAWEERKESVIVEGVHLSLNFVMGLMKKHPSIVPFMVYIANEEKHLERFAVRAKYMTLDPEKNKYVKYIRNIRTIQDYLCKRADKHLVPKINNTNVDKSVAAIHATVFSCLRRREAGEHLYDATTNTVSVIDDEYRNQCTANSLSSKGMFQLIQRKGSSRHLMALLNTDGTFARTWPVTGKVDESGKPVFCNEMIEENGMEHPVYGYLQKAEPVNLQFGLFGISAWPSDGATSRAGSVDDCKADMAETSSRYYSSCCSSPRMSEGTSKELKEDQSVHGSDEEVEDDPPEPDTDFSDDDNKRDHDEVGSVDEQSTKSDEEYDDLAMEDKSYWTDEEEESRDTIAIMSEKNNKQATKEDKYIQNLDLFLRTANQQLVEPLQLCASLLTCENGNTRLWLGKEKMRKRSLSISAIGKHGSGLGDAILLGAP

SEQ ID NO: 108058 - protein, 731 aa, Arabidopsis thaliana
  peptide (1)..(731): Ceres Seq. ID no. 13653130
MYIVVVDGTDTAETVEEDGTGTWKDSFRYTRPVLQSTLQLMGCKARHAFKISRRVFELIRSEGSLILSPSLSPSHSKESEFQKTGDASACANVEKANKVNSLATDDVDKSKSKPFEVYKRRTTVVVSREIFVNVVCDALAEYKYVGHDQRADLILSCRIRERKESVTVLLCGTSGCGKSTLSALLGSRLGITTVVSTDSIRHMMRSFVDEKQNPLLWASTYHAGEYLDPVAVAESKARRRRAKKMDSIEDEKAKASEGGKAKNTQQTDVGSTKNTPVLLSPKQMAVEGFKAQSEMVIDNLDRLITAWEERKESVIVEGVHLSLNFVMGLMKKHPSIVPFMVYIANEEKHLERFAVRAKYMTLDPEKNKYVKYIRNIRTIQDYLCKRADKHLVPKINNTNVDKSVAAIHATVFSCLRRREAGEHLYDATTNTVSVIDDEYRNQCTANSLSSKGMFQLIQRKGSSRHLMALLNTDGTFARTWPVTGKVDESGKPVFCNEMIEENGMEHPVYGYLQKAEPVNLQFGLFGISAWPSDGATSRAGSVDDCKADMAETSSRYYSSCCSSPRMSEGTSKELKEDQSVHGSDEEVEDDPPEPDTDFSDDDNKRDHDEVGSVDEQSTKSDEEYDDLAMEDKSYWTDEEEESRDTIAIMSEKNNKQATKEDKYIQNLDLFLRTANQQLVEPLQLCASLLTCENGNTRLWLGKEKMRKRSLSISAIGKHGSGLGDAILLGAP

SEQ ID NO: 108059 - protein, 691 aa, Arabidopsis thaliana
  peptide (1)..(691): Ceres Seq. ID no. 13653131
MGCKARHAFKISRRVFELIRSEGSLILSPSLSPSHSKESEFQKTGDASACANVEKANKVNSLATDDVDKSKSKPFEVYKRRTTVVVSREIFVNVVCDALAEYKYVGHDQRADLILSCRIRERKESVTVLLCGTSGCGKSTLSALLGSRLGITTVVSTDSIRHMMRSFVDEKQNPLLWASTYHAGEYLDPVAVAESKARRRRAKKMDSIEDEKAKASEGGKAKNTQQTDVGSTKNTPVLLSPKQMAVEGFKAQSEMVIDNLDRLITAWEERKESVIVEGVHLSLNFVMGLMKKHPSIVPFMVYIANEEKHLERFAVRAKYMTLDPEKNKYVKYIRNIRTIQDYLCKRADKHLVPKINNTNVDKSVAAIHATVFSCLRRREAGEHLYDATTNTVSVIDDEYRNQCTANSLSSKGMFQLIQRKGSSRHLMALLNTDGTFARTWPVTGKVDESGKPVFCNEMIEENGMEHPVYGYLQKAEPVNLQFGLFGISAWPSDGATSRAGSVDDCKADMAETSSRYYSSCCSSPRMSEGTSKELKEDQSVHGSDEEVEDDPPEPDTDFSDDDNKRDHDEVGSVDEQSTKSDEEYDDLAMEDKSYWTDEEEESRDTIAIMSEKNNKQATKEDKYIQNLDLFLRTANQQLVEPLQLCASLLTCENGNTRLWLGKEKMRKRSLSISAIGKHGSGLGDAILLGAP

SEQ ID NO: 108060 - DNA, 1686 bp, Arabidopsis thaliana
  misc_feature (1)..(1686): Ceres Seq. ID no. 13653136
  misc_feature (1)..(1686): Ortholog of  Ceres SEQ ID NO 13594037 as cited in SEQ ID NO 55666
  misc_feature (1)..(1686): Ortholog of  Ceres SEQ ID NO 13657707 as cited in SEQ ID NO 66407
atcagttaagataatatatattcagtaattaagagagaagaaataaacacaaaaatgttggttaaagttttctcttttttcatccttatgataacaatggtggttattggtgttagcaaagaatattgtgatgacaaacagtcatgtcaaaactttttgttggagcttaaggcgggttcatcgtcactctcggagattagacgtcgtgacttattgatcatcgttttgaagaattccgtacggaggatcgacatggttatgattggtgtgatggatgatacaaaacaacatgaggagatggagaatgatttgcttggtgtgaaggaggacacaaaactatttgaggagatgatggagtcgacaaaagataggatgatccgttcggtggaggaactcttaggaggagaatttcctaatcgtggatcttacgagaacgtccacacttggctcagtagcgttcttactagttacatcacatgtatcgacgaaattggtgaaggtgcctataaacgccgtgtcgagccaaagcttgaagacctcatttctagggcaagaatagctttggctctctttatctccatttcaccgagagacaacaccgaacttatctcggtgattcccaatagcccttcttggttattccatgttgacaagaaagatctatatctcaatgctgaggctctaaagaagattgctgatgttgtggtcgcgaaggatgggaccggaaagtacagcacagtgaatgcggccattgcagcggcacctcaacacagccaaaagagattcgtcatctatataaagacaggcatttatgatgaaatcgtcgtcattgagaatacgaaacccaatttaactcttataggtgatggtcaagatttaaccatcatcacgagcaatttaagtgctagcaatgttagaagaacgttcaacaccgcaactgttgcttctaatggtaatggattcatcggagtagacatgtgcttccgaaacacggccgggccggcaaaaggaccagctgttgccctccgtgtgagtggtgatatgtccgtcatttatagatgccgtgtcgagggatatcaggatgccttgtatcctcacagtgaccgccagttttatagagagtgctttattaccggcactgtagatttcatttgtgggaacgcggtggcggtctttcaattctgccagattgtagcaagacaacctaagatggggcagagcaatgtcataaccgctcagtcacgcgcatttaaggacatttactcgggcttcacgattcaaaaatgcaacattactgcaagctcggatctagacacgacaaccgttaaaacgtatcttggaagaccttggaggatattttcaacagtcgcagttatgcagtctttcatcggtgatttagttgatcccgctggctggactccttgggaaggagaaactggtttgtcaactctccactaccgcgaatatcaaaacaggggtccaggagctgtgactagcagaagggtgaagtggtcaggctttaaagttatgaaagatcctaaacaggctacagaattcactgtagccaagctcttagatggagaaacttggttgaaagaaactcgaatcccatatgaaagtggattgtaataatgttgttccatgcttcacatgtataacgtactaaataaaagatattattcttct

SEQ ID NO: 108061 - protein, 524 aa, Arabidopsis thaliana
  peptide (1)..(524): Ceres Seq. ID no. 13653137
MLVKVFSFFILMITMVVIGVSKEYCDDKQSCQNFLLELKAGSSSLSEIRRRDLLIIVLKNSVRRIDMVMIGVMDDTKQHEEMENDLLGVKEDTKLFEEMMESTKDRMIRSVEELLGGEFPNRGSYENVHTWLSSVLTSYITCIDEIGEGAYKRRVEPKLEDLISRARIALALFISISPRDNTELISVIPNSPSWLFHVDKKDLYLNAEALKKIADVVVAKDGTGKYSTVNAAIAAAPQHSQKRFVIYIKTGIYDEIVVIENTKPNLTLIGDGQDLTIITSNLSASNVRRTFNTATVASNGNGFIGVDMCFRNTAGPAKGPAVALRVSGDMSVIYRCRVEGYQDALYPHSDRQFYRECFITGTVDFICGNAVAVFQFCQIVARQPKMGQSNVITAQSRAFKDIYSGFTIQKCNITASSDLDTTTVKTYLGRPWRIFSTVAVMQSFIGDLVDPAGWTPWEGETGLSTLHYREYQNRGPGAVTSRRVKWSGFKVMKDPKQATEFTVAKLLDGETWLKETRIPYESGL

SEQ ID NO: 108062 - protein, 513 aa, Arabidopsis thaliana
  peptide (1)..(513): Ceres Seq. ID no. 13653138
MITMVVIGVSKEYCDDKQSCQNFLLELKAGSSSLSEIRRRDLLIIVLKNSVRRIDMVMIGVMDDTKQHEEMENDLLGVKEDTKLFEEMMESTKDRMIRSVEELLGGEFPNRGSYENVHTWLSSVLTSYITCIDEIGEGAYKRRVEPKLEDLISRARIALALFISISPRDNTELISVIPNSPSWLFHVDKKDLYLNAEALKKIADVVVAKDGTGKYSTVNAAIAAAPQHSQKRFVIYIKTGIYDEIVVIENTKPNLTLIGDGQDLTIITSNLSASNVRRTFNTATVASNGNGFIGVDMCFRNTAGPAKGPAVALRVSGDMSVIYRCRVEGYQDALYPHSDRQFYRECFITGTVDFICGNAVAVFQFCQIVARQPKMGQSNVITAQSRAFKDIYSGFTIQKCNITASSDLDTTTVKTYLGRPWRIFSTVAVMQSFIGDLVDPAGWTPWEGETGLSTLHYREYQNRGPGAVTSRRVKWSGFKVMKDPKQATEFTVAKLLDGETWLKETRIPYESGL

SEQ ID NO: 108063 - protein, 510 aa, Arabidopsis thaliana
  peptide (1)..(510): Ceres Seq. ID no. 13653139
MVVIGVSKEYCDDKQSCQNFLLELKAGSSSLSEIRRRDLLIIVLKNSVRRIDMVMIGVMDDTKQHEEMENDLLGVKEDTKLFEEMMESTKDRMIRSVEELLGGEFPNRGSYENVHTWLSSVLTSYITCIDEIGEGAYKRRVEPKLEDLISRARIALALFISISPRDNTELISVIPNSPSWLFHVDKKDLYLNAEALKKIADVVVAKDGTGKYSTVNAAIAAAPQHSQKRFVIYIKTGIYDEIVVIENTKPNLTLIGDGQDLTIITSNLSASNVRRTFNTATVASNGNGFIGVDMCFRNTAGPAKGPAVALRVSGDMSVIYRCRVEGYQDALYPHSDRQFYRECFITGTVDFICGNAVAVFQFCQIVARQPKMGQSNVITAQSRAFKDIYSGFTIQKCNITASSDLDTTTVKTYLGRPWRIFSTVAVMQSFIGDLVDPAGWTPWEGETGLSTLHYREYQNRGPGAVTSRRVKWSGFKVMKDPKQATEFTVAKLLDGETWLKETRIPYESGL

SEQ ID NO: 108064 - DNA, 1307 bp, Arabidopsis thaliana
  misc_feature (1)..(1307): Ceres Seq. ID no. 13653140
  misc_feature (1)..(1307): Ortholog of  Ceres SEQ ID NO 15168429 as cited in SEQ ID NO 57818
gctttgctcctaaaccacaacaaatggctctcgaaacttttctaataaaactcaaaaacgctatttcctccaaaccaacttctcgtcgaccacaccgatcatctcctccgatatcaaccaccacttcctccgtcggagtattatcgttcgaagtagcacgtgtcatgaccaaactcctacatctcactcactctctcaccgattccaatctcctcactcctcgagaccactctctacgaaaacaaagtttacagattgggatcgaattcgaagaagaagaagactacgagaacaagaaagatgttatgaaagtgatagatctacagaacaagattgagagacagaaacaacatgtcaagtatctaaaagacagatctctctggaacaaaagcttcgacactgtcgtgttgattctcgccagatcggtattcacagcactcgctagactcaaatccgtcttctcctccgccgcagccactgggtacatggttccgaccgtcgtgtcttctctccctcgttctctctcttcttcttcttcctctatgaatcttgttcaccctagcccaaacgacgaagagagagacaagacgacgacgtcttctgcgtttcttgaagaaagctcaagactattgaaaccaccggagacaactctcggcggagctggcgtggcgcttcactacgcgaatctgatagtagtaatggagaagatgataaagcaacctcagcttgtaggtcttgacgcgagagacgatctgtattcaatgttaccggcaagtgtgagatcgtcacttaggtcaaggctaaaaggagttggtttcacggcgacggacggtggtttagcgacggagtggaaggcggctttaggtcggatcttacggtggttgttaccattggcgcagaatatgattaggtggcagagtgagagaagctttgagcagcaacacatggcgacggcaacgaatagtcagaacagagtgatgttagttcaaacactagtgtttgcagataaagttaagacagaagcagccataacagagcttcttgttgggttgaattacatctggagattcgaaagagagatgactgcgaaagctctgtttaatctacagtgtcctcctactaattacagctaattttgtgtagagttttttgtcttcttcttttttttttttgtttgatgggttaatgttgatttcttgtttttttttggtttagtttgataatacgaattatgaaagtgatttgggtggggtatgatgtgatgtgtaacaatgtagatattggaatgaatttgagtgattgttttc

SEQ ID NO: 108065 - protein, 376 aa, Arabidopsis thaliana
  peptide (1)..(376): Ceres Seq. ID no. 13653141
FAPKPQQMALETFLIKLKNAISSKPTSRRPHRSSPPISTTTSSVGVLSFEVARVMTKLLHLTHSLTDSNLLTPRDHSLRKQSLQIGIEFEEEEDYENKKDVMKVIDLQNKIERQKQHVKYLKDRSLWNKSFDTVVLILARSVFTALARLKSVFSSAAATGYMVPTVVSSLPRSLSSSSSSMNLVHPSPNDEERDKTTTSSAFLEESSRLLKPPETTLGGAGVALHYANLIVVMEKMIKQPQLVGLDARDDLYSMLPASVRSSLRSRLKGVGFTATDGGLATEWKAALGRILRWLLPLAQNMIRWQSERSFEQQHMATATNSQNRVMLVQTLVFADKVKTEAAITELLVGLNYIWRFEREMTAKALFNLQCPPTNYS

SEQ ID NO: 108066 - protein, 369 aa, Arabidopsis thaliana
  peptide (1)..(369): Ceres Seq. ID no. 13653142
MALETFLIKLKNAISSKPTSRRPHRSSPPISTTTSSVGVLSFEVARVMTKLLHLTHSLTDSNLLTPRDHSLRKQSLQIGIEFEEEEDYENKKDVMKVIDLQNKIERQKQHVKYLKDRSLWNKSFDTVVLILARSVFTALARLKSVFSSAAATGYMVPTVVSSLPRSLSSSSSSMNLVHPSPNDEERDKTTTSSAFLEESSRLLKPPETTLGGAGVALHYANLIVVMEKMIKQPQLVGLDARDDLYSMLPASVRSSLRSRLKGVGFTATDGGLATEWKAALGRILRWLLPLAQNMIRWQSERSFEQQHMATATNSQNRVMLVQTLVFADKVKTEAAITELLVGLNYIWRFEREMTAKALFNLQCPPTNYS

SEQ ID NO: 108067 - protein, 322 aa, Arabidopsis thaliana
  peptide (1)..(322): Ceres Seq. ID no. 13653143
MTKLLHLTHSLTDSNLLTPRDHSLRKQSLQIGIEFEEEEDYENKKDVMKVIDLQNKIERQKQHVKYLKDRSLWNKSFDTVVLILARSVFTALARLKSVFSSAAATGYMVPTVVSSLPRSLSSSSSSMNLVHPSPNDEERDKTTTSSAFLEESSRLLKPPETTLGGAGVALHYANLIVVMEKMIKQPQLVGLDARDDLYSMLPASVRSSLRSRLKGVGFTATDGGLATEWKAALGRILRWLLPLAQNMIRWQSERSFEQQHMATATNSQNRVMLVQTLVFADKVKTEAAITELLVGLNYIWRFEREMTAKALFNLQCPPTNYS

SEQ ID NO: 108068 - DNA, 1053 bp, Arabidopsis thaliana
  misc_feature (1)..(1053): Ceres Seq. ID no. 13653144
  misc_feature (1)..(1053): Ortholog of  Ceres SEQ ID NO 13596375 as cited in SEQ ID NO 68048
tggttgaagacgacggagacggcgacggcgagaagcaatgacgactgaggaaaataaaacaagcagaaataggaagaggaagagacagagaaaccctaaaccttctaaagaagaacctatcgagacgacaccgaagaatcaaaacgagaaaaagaatcaaagagataccaaaaaccaacaacatggaggttcttcagctccatcgaaacgacctaaaccttccaatttcctcgatgcgcttagagagagattatctggtgggcaatttaggatgctcaatgagaaactctacacttgctctggaaaagaagctttagactactttaaagaagatccacaaatgtttgatatgtatcatacagggtatcaacaacaaatgtcaaattggcctgagcttcctgttaactccattattaattggctattgtctaatagctcttctttagttgtggctgattttggctgtggtgatgcaaggattgctaaaagtgtgaagaacaaagttttctcctttgatcttgtctcaaagaacccctctgttattgcctgcgatatgtcaaatacttcacttgagtcttcatcagtggatgttgcagttttctgtctttcattaatgggaacaaactattctagttatatcaaagaagcacatcgagttcttcgtccaagtggtatgcttcttatagcggaagtaaagagcaggtttgatccaaacaatggaggagcagacccaaaagactttgtgaaagccgtttgtgatcttggatttacttcggttttaaaggacttctccaataagatgttcatcttattccatttcaagaaaaaggagcagatgaattcaaatcagaagataataaagtggcctgagttaaaagcttgtttatacaaacgtcgatgatgagtttacaatggaagattactcagaatactatttttgttctccactgttgtatcatttaggcacattgattgtcctcaaaatctcataaatttgcaccctataaacttttgtaagagaaaagcaatcacaaagatttttcaagtgtttag

SEQ ID NO: 108069 - protein, 287 aa, Arabidopsis thaliana
  peptide (1)..(287): Ceres Seq. ID no. 13653145
MTTEENKTSRNRKRKRQRNPKPSKEEPIETTPKNQNEKKNQRDTKNQQHGGSSAPSKRPKPSNFLDALRERLSGGQFRMLNEKLYTCSGKEALDYFKEDPQMFDMYHTGYQQQMSNWPELPVNSIINWLLSNSSSLVVADFGCGDARIAKSVKNKVFSFDLVSKNPSVIACDMSNTSLESSSVDVAVFCLSLMGTNYSSYIKEAHRVLRPSGMLLIAEVKSRFDPNNGGADPKDFVKAVCDLGFTSVLKDFSNKMFILFHFKKKEQMNSNQKIIKWPELKACLYKRR

SEQ ID NO: 108070 - protein, 209 aa, Arabidopsis thaliana
  peptide (1)..(209): Ceres Seq. ID no. 13653146
MLNEKLYTCSGKEALDYFKEDPQMFDMYHTGYQQQMSNWPELPVNSIINWLLSNSSSLVVADFGCGDARIAKSVKNKVFSFDLVSKNPSVIACDMSNTSLESSSVDVAVFCLSLMGTNYSSYIKEAHRVLRPSGMLLIAEVKSRFDPNNGGADPKDFVKAVCDLGFTSVLKDFSNKMFILFHFKKKEQMNSNQKIIKWPELKACLYKRR

SEQ ID NO: 108071 - protein, 186 aa, Arabidopsis thaliana
  peptide (1)..(186): Ceres Seq. ID no. 13653147
MFDMYHTGYQQQMSNWPELPVNSIINWLLSNSSSLVVADFGCGDARIAKSVKNKVFSFDLVSKNPSVIACDMSNTSLESSSVDVAVFCLSLMGTNYSSYIKEAHRVLRPSGMLLIAEVKSRFDPNNGGADPKDFVKAVCDLGFTSVLKDFSNKMFILFHFKKKEQMNSNQKIIKWPELKACLYKRR

SEQ ID NO: 108072 - DNA, 1107 bp, Arabidopsis thaliana
  misc_feature (1)..(1107): Ceres Seq. ID no. 13653148
  misc_feature (1)..(1107): Ortholog of  Ceres SEQ ID NO 13597757 as cited in SEQ ID NO 65472
agccaaacccccccaattttggcctctcgatttagttttttgaaaccctaagctcgatttcgatcctccggcatactcggtttcgccgccgaatctctgcttgtagcgagtgttactattcaatcggcgagaatgtcgatgtcgaagagttcaaagatgcttcagttcatcaactacaggatgcgagtgacgatccaagacggaagacagctcgttgggaagttcatggcgtttgaccgtcacatgaacctcgttctcggcgattgcgaggagtttcgtaagcttccaccagctaaagggaagaagatcaacgaagagcgtgaagatcgccgtacgctaggtttagtgttgcttagaggtgaagaagttatctcaatgactgtcgaaggaccacctcctcctgaagaatctcgtgctaaagctggctctgcagctgctgttgctggtccaggaattggccgtgccgctgggcgtggagttcctactggtccgttagttcaagctcagcctggtttatctggtcctgttcgtggtgttggtggacctgctccgggaatgatgcagcctcagatctctcgtccaccacagctttcagctcctccgattattcgacctccgggacagatgttgccaccgcctccttttggtggtcaaggtcctcctatgggaagaggtcctccaccgccttatggtatgaggccaccgccacagcagttttctggaccaccaccgcctcagtatgggcaaaggccaatgattcctcctcctggtggtatgatgagaggacctcctcctccacctcatggaatgcaaggacctcctccgcctcgccctggaatgcctcctgctcctggtggttttgctccaccgcgtcctggcatgccaccacataatcagcagcagtgattaggtttacggtatcgtgctatcatgttgcctttcattgactttagccgcaatttctcatctatcttagctttcaaagtttgtagatttgttgacgagtgagttgtctttgccttatcttcttgtgttttcttttaagaacgaatccattaaactttgttatgtcttcttaaggtaaacatctatcttgaggatcgtttt

SEQ ID NO: 108073 - protein, 257 aa, Arabidopsis thaliana; identical to SEQ ID NO: 87866
  peptide (1)..(257): Ceres Seq. ID no. 13653149

SEQ ID NO: 108074 - protein, 255 aa, Arabidopsis thaliana; identical to SEQ ID NO: 87867
  peptide (1)..(255): Ceres Seq. ID no. 13653150

SEQ ID NO: 108075 - protein, 249 aa, Arabidopsis thaliana; identical to SEQ ID NO: 87868
  peptide (1)..(249): Ceres Seq. ID no. 13653151

SEQ ID NO: 108076 - DNA, 1488 bp, Arabidopsis thaliana
  misc_feature (1)..(1488): Ceres Seq. ID no. 13653156
  misc_feature (1)..(1488): Ortholog of  Ceres SEQ ID NO 13664220 as cited in SEQ ID NO 61151
  misc_feature (1)..(1488): Ortholog of  Ceres SEQ ID NO 13597477 as cited in SEQ ID NO 65160
agatgaagttttctgcaggtctcttggactagagcagtgtcttcttttgttattagtttccatcttctgtcatttccttgttttatattccaaaaagagaaggtgaatctgatcttactttctggtccacctctaagcacttttaaatggagaagaaaggccagcatggtacatatgaatcaatgatgactcatcatccgatcctctgtatcattgctttatctgtacttttcatagcaatcgacccctttcacatgagtccaatcgggggtcgtgagttcaaacccgtgaagcatgaggttgctccatataaggaagtcatgggaagctggcctagagacaaccttagtcgactgggtaatcatgggaaactggagttcgtggaccaagtctttggtccagagtcattagagtttgatagtttaggtcgtggtccatacacagggttggctgatggaagagtggttagatggatgggtgaagcaatcggatgggagacattttcggtggtaacatcaaaatggtcagaggaagcttgtgtgagaggtgtggattcaacaacaaacaagcaatggaagcacgagaagctgtgtgggaggcctcttggactgagatttcataaagagacaggaaatttgtatattgcagacgcttactatggtctacttgtggttggtcctgaaggagggattgctacgcctttagctactcatgtggaaggaaagcctatactctttgccaatgaccttgacatccatagaaatggctccatcttcttcactgacaccagcaaaagatatgacagagcgaatcatttctttatattactggaaggagaatcaacaggaaggcttctaagatatgacccacctaccaaaacaacacacattgtgctggagggtttggcttttcccaatggaattcaactctctaaagaccaatctttcctcctcttcaccgaaacaaccaattgcagattggtgaagtactggctggagggtccaaagatgggtgaagtcgaggtggtggcagatctcccgggattcccagacaatgtaagaataaatgaagagggtcagttttgggttgcaattgattgttgcagaacaccggcacaagaggttcttacaaacaacccttggataagaagcatctactttcggttgccaataccgatgaagctgcttgcgaaaacgatggggatgagaatgtacactgtgatatcgagattcgacgaggaaggtaaagtcctggaggtgctcgaggatagacaagggaaggtaatgaagcttgtgagtgaagtgagggaagttcaagggaagctttggattggaacagtggctcataaccacattgccactctaccttatcctttgacaatgaatcaatgaaggactttgttgtgtagttcctgaactaaatcatctctctgtaacttaattatcttcgttttgattcaagttcctttggaccggtttgtcttttgtt

SEQ ID NO: 108077 - protein, 414 aa, Arabidopsis thaliana; identical to SEQ ID NO: 25219
  peptide (1)..(414): Ceres Seq. ID no. 13653157

SEQ ID NO: 108078 - protein, 402 aa, Arabidopsis thaliana; identical to SEQ ID NO: 25220
  peptide (1)..(402): Ceres Seq. ID no. 13653158

SEQ ID NO: 108079 - protein, 401 aa, Arabidopsis thaliana; identical to SEQ ID NO: 25221
  peptide (1)..(401): Ceres Seq. ID no. 13653159

SEQ ID NO: 108080 - DNA, 823 bp, Arabidopsis thaliana
  misc_feature (1)..(823): Ceres Seq. ID no. 13653171
  misc_feature (1)..(823): Ortholog of  Ceres SEQ ID NO 14304090 as cited in SEQ ID NO 53446
  misc_feature (1)..(823): Ortholog of  Ceres SEQ ID NO 14311355 as cited in SEQ ID NO 54082
accgcttaccagttactaacttgagcttcagagatcatcatcatcatcacttcctctctctgaagaaaacacaatttggagttttctaatcttcattccaatggaagggaactctttacccgaagaagatgtagagatgatggagaattcagatgtaatgaagacagtcacagatgaagcttctccaatggtggagccgttcattggtatggagtttgaatcagaagaggctgcaaagtctttctatgacaattacgctacatgcatgggtttcgttatgcgagtggatgctttcaggaggtcaatgcgagatgggactgtggtgtggcgcagactcgtgtgtaataaagaaggatttcgtaggtcgagacctcggagaagcgagagtagaaagcctcgggctataacaagagaagggtgtaaagctctgattgttgtgaaaagagagaaatccggaacatggcttgttactaaatttgagaaagagcataatcatcctctcttgcctctctcccctaatgttcgccggaattttcagctccctcaaacaccggacgagaaagacgcaaagattagggagctgagtgcagagctgagccgagagagaaggcgttgtactgctttgcaacagcagcttgatatggtccttaaggagatggaagaacattccaaccatctcaccattaacatcaatagtgttatccaaagtgttagagacattgagtccaatactttcaccaaacaacaaacataatgcttcatttctgttcataaaagcttaacatcaaattctcataatccaatgttctgtatcttgtgattg

SEQ ID NO: 108081 - protein, 217 aa, Arabidopsis thaliana
  peptide (1)..(217): Ceres Seq. ID no. 13653172
MEGNSLPEEDVEMMENSDVMKTVTDEASPMVEPFIGMEFESEEAAKSFYDNYATCMGFVMRVDAFRRSMRDGTVVWRRLVCNKEGFRRSRPRRSESRKPRAITREGCKALIVVKREKSGTWLVTKFEKEHNHPLLPLSPNVRRNFQLPQTPDEKDAKIRELSAELSRERRRCTALQQQLDMVLKEMEEHSNHLTININSVIQSVRDIESNTFTKQQT

SEQ ID NO: 108082 - protein, 205 aa, Arabidopsis thaliana; identical to SEQ ID NO: 104385
  peptide (1)..(205): Ceres Seq. ID no. 13653173

SEQ ID NO: 108083 - protein, 204 aa, Arabidopsis thaliana; identical to SEQ ID NO: 104386
  peptide (1)..(204): Ceres Seq. ID no. 13653174

SEQ ID NO: 108084 - DNA, 1012 bp, Arabidopsis thaliana
  misc_feature (1)..(1012): Ceres Seq. ID no. 13653175
  misc_feature (1)..(1012): Ortholog of  Ceres SEQ ID NO 12609146 as cited in SEQ ID NO 52118
  misc_feature (1)..(1012): Ortholog of  Ceres SEQ ID NO 14316158 as cited in SEQ ID NO 52413
  misc_feature (1)..(1012): Ortholog of  Ceres SEQ ID NO 13638136 as cited in SEQ ID NO 58644
  misc_feature (1)..(1012): Ortholog of  Ceres SEQ ID NO 13596868 as cited in SEQ ID NO 62806
  misc_feature (1)..(1012): Ortholog of  Ceres SEQ ID NO 12587035 as cited in SEQ ID NO 63605
  misc_feature (1)..(1012): Ortholog of  Ceres SEQ ID NO 12566239 as cited in SEQ ID NO 0
  misc_feature (1)..(1012): Ortholog of  Ceres SEQ ID NO 13599119 as cited in SEQ ID NO 0
gtcacgaaggtgttaattagcatgaaagagagagaaataatcgtcgttgaccattgaccataacttagtcagtcatatatataaaaatccaaccgcccactattgttcccctattcacaaggtccttgctttctcagacgtaaacaacaagaaattatattaacacaacaacaacaacaaaaagaccaaccctatttattcatattttctcttatatgcaactctcaaagaatccgatcaaacaaacgagaaatcgagagaagaattacaccgacgatttcaccatgaagagaagatggttgttcgatggagagtgcgataagagaaggttatatcaaaacggatgaggatttcttgaaagaaggttcgagaggtggcgcgtgttgtgtaaccgctttgatatcgaaaggcgagcttgcggtttcgaatgcaggcgactgccgggctgttatgagtcgtggtggaaccgcggaagctctcacttccgatcataatccttctcaagcaaatgagctcaaaaggattgaagcattgggtggttatgttgactgctgcaacggcgtttggagaattcaagggacattagcagtctcacgaggaattggagaccggtacctcaaggagtgggtgatagctgaaccggaaaccagaacattacggattaaaccggagttcgaattcttgatcttagcatctgatggcctgtgggacaaggtaacgaaccaagaggccgtcgatgtcgttcgaccgtactgcgtaggcgtagagaatccaatgacactttctgcttgcaagaaactggctgagctatcggttaagagaggctctttggatgatataagtctaattataattcagctacaaaactttcttccatgatatattaacacatagtacattagctaaacttaattaatttcattaggtcgtagttattaataaattttgttcggtattttacatgtaaatacataaaggtttggaaaataattaatttattgttattgttctt

SEQ ID NO: 108085 - protein, 190 aa, Arabidopsis thaliana
  peptide (1)..(190): Ceres Seq. ID no. 13653176
MESAIREGYIKTDEDFLKEGSRGGACCVTALISKGELAVSNAGDCRAVMSRGGTAEALTSDHNPSQANELKRIEALGGYVDCCNGVWRIQGTLAVSRGIGDRYLKEWVIAEPETRTLRIKPEFEFLILASDGLWDKVTNQEAVDVVRPYCVGVENPMTLSACKKLAELSVKRGSLDDISLIIIQLQNFLP

SEQ ID NO: 108086 - protein, 142 aa, Arabidopsis thaliana
  peptide (1)..(142): Ceres Seq. ID no. 13653177
MSRGGTAEALTSDHNPSQANELKRIEALGGYVDCCNGVWRIQGTLAVSRGIGDRYLKEWVIAEPETRTLRIKPEFEFLILASDGLWDKVTNQEAVDVVRPYCVGVENPMTLSACKKLAELSVKRGSLDDISLIIIQLQNFLP

SEQ ID NO: 108087 - DNA, 1492 bp, Arabidopsis thaliana
  misc_feature (1)..(1492): Ceres Seq. ID no. 13653178
  misc_feature (1)..(1492): Ortholog of  Ceres SEQ ID NO 13582281 as cited in SEQ ID NO 51014
gagagaaaaaagcagatacttctttttgtgttcttgaattacttctttacttttgtgttttcacaatttgagaaacgaaatggagccaaagtttcatgcttttatgtttccatggtttgcttttggtcatatgattccatttctacatcttgcaaacaaactagctgaaaaaggtcaccgagttactttcttgctacctaagaaagcacaaaaacagttggaacatcacaacttgttcccagacagtattgtctttcaccctctcacagttcctcctgtcaatggcctccctgctggtgccgagacaacctcggatatccccatctcgttggacaacctcttgtccaaagccttggatctcactcgcgatcaggttgaagctgcggttcgtgctttgagacctgacttgatctttttcgattttgctcaatggattccagatatggctaaagaacatatgatcaagagtgtgagttacatcattgtatctgcgacaacaatagctcatacacatgtccctggaggtaaattaggtgttcgcccaccgggttatccgtcatcaaaggtgatgttccgtgaaaacgatgttcatgccttagcaaccttatcgatattttacaagagactgtatcatcagatcactacaggtcttaagagctgtgatgtcattgcattgaggacttgcaaagaagtcgaagacacaagtaaaccactagaagaacgctggaatcattttctaagcgggttcgcgccgaagtcagtagtgttttgttcacctggcagccaagtaattcttgagaaagatcaattccaagaactctgtttagggatggagctaacaggtttaccatttcttttagcggtaaagccaccaagaggatcatcaacggtccaagaagggttaccagaagggttcgaggagcgggtgaaagatcgtggtgttgtttggggaggatgggtgcaacaacctttgatattggctcatccatcaataggttgctttgtgaaccattgtggtcccggaacaatatgggagtctttggtgagtgattgccaaatggttttgattccatttttaagtgatcaagttctcttcacaagattgatgaccgaggaattcgaggtctctgtagaagtgccgaggaaaaaaacaggatggttttcaaaggagagcttgagcaatgctatcaaatctgtgatggataaagacagtgacattgggaagttagtgaggagtaaccacaccaaattgaaggagattttagttagtcctggattattgactggttacgttgatcactttgtagagggattgcaagagaatttgatttgattatgttgaagactggtcatcatatttaagtaaggttgggacgcttttattttatttttaaataaattccgattacgataataatttgcaaagtataataaatctgaaaataattgtaattacacaatatatttctcaaatttatagtgacattatatt

SEQ ID NO: 108088 - protein, 417 aa, Arabidopsis thaliana
  peptide (1)..(417): Ceres Seq. ID no. 13653179
MEPKFHAFMFPWFAFGHMIPFLHLANKLAEKGHRVTFLLPKKAQKQLEHHNLFPDSIVFHPLTVPPVNGLPAGAETTSDIPISLDNLLSKALDLTRDQVEAAVRALRPDLIFFDFAQWIPDMAKEHMIKSVSYIIVSATTIAHTHVPGGKLGVRPPGYPSSKVMFRENDVHALATLSIFYKRLYHQITTGLKSCDVIALRTCKEVEDTSKPLEERWNHFLSGFAPKSVVFCSPGSQVILEKDQFQELCLGMELTGLPFLLAVKPPRGSSTVQEGLPEGFEERVKDRGVVWGGWVQQPLILAHPSIGCFVNHCGPGTIWESLVSDCQMVLIPFLSDQVLFTRLMTEEFEVSVEVPRKKTGWFSKESLSNAIKSVMDKDSDIGKLVRSNHTKLKEILVSPGLLTGYVDHFVEGLQENLI

SEQ ID NO: 108089 - protein, 409 aa, Arabidopsis thaliana
  peptide (1)..(409): Ceres Seq. ID no. 13653180
MFPWFAFGHMIPFLHLANKLAEKGHRVTFLLPKKAQKQLEHHNLFPDSIVFHPLTVPPVNGLPAGAETTSDIPISLDNLLSKALDLTRDQVEAAVRALRPDLIFFDFAQWIPDMAKEHMIKSVSYIIVSATTIAHTHVPGGKLGVRPPGYPSSKVMFRENDVHALATLSIFYKRLYHQITTGLKSCDVIALRTCKEVEDTSKPLEERWNHFLSGFAPKSVVFCSPGSQVILEKDQFQELCLGMELTGLPFLLAVKPPRGSSTVQEGLPEGFEERVKDRGVVWGGWVQQPLILAHPSIGCFVNHCGPGTIWESLVSDCQMVLIPFLSDQVLFTRLMTEEFEVSVEVPRKKTGWFSKESLSNAIKSVMDKDSDIGKLVRSNHTKLKEILVSPGLLTGYVDHFVEGLQENLI

SEQ ID NO: 108090 - protein, 400 aa, Arabidopsis thaliana
  peptide (1)..(400): Ceres Seq. ID no. 13653181
MIPFLHLANKLAEKGHRVTFLLPKKAQKQLEHHNLFPDSIVFHPLTVPPVNGLPAGAETTSDIPISLDNLLSKALDLTRDQVEAAVRALRPDLIFFDFAQWIPDMAKEHMIKSVSYIIVSATTIAHTHVPGGKLGVRPPGYPSSKVMFRENDVHALATLSIFYKRLYHQITTGLKSCDVIALRTCKEVEDTSKPLEERWNHFLSGFAPKSVVFCSPGSQVILEKDQFQELCLGMELTGLPFLLAVKPPRGSSTVQEGLPEGFEERVKDRGVVWGGWVQQPLILAHPSIGCFVNHCGPGTIWESLVSDCQMVLIPFLSDQVLFTRLMTEEFEVSVEVPRKKTGWFSKESLSNAIKSVMDKDSDIGKLVRSNHTKLKEILVSPGLLTGYVDHFVEGLQENLI

SEQ ID NO: 108091 - DNA, 1620 bp, Arabidopsis thaliana
  misc_feature (1)..(1620): Ceres Seq. ID no. 13653186
  misc_feature (1)..(1620): Ortholog of  Ceres SEQ ID NO 13596984 as cited in SEQ ID NO 63196
gtaactttttgggtttcaagattcgatctatcacttcccatggctagagaaaacccattgatgagcttctcctttagtttcagatatctctgtcactttgctctactcctctctctcctctcctttgtctcttttctcttcagacacaacacatcactctgttcttgtctttacgatcacaacacctacgttaacacattcgatcatcagcaaaacaatgaaaccatcgatcttcttcgattctcttctgcttggaaccatctcactttcccttctaaacccaagaagactctcaagatcgctgtggtggtcaagaaatggccgaggaaatcgcaagctggtgggctcgagcgacacgcgcttacattgcatctcgctctagccaatcgtggccacgagcttcatgttttcaccgctgcttctccatcgttccctgaatatcaactgaaaaatctgatgttccatctctctgagccaaccgctgctggatatcttgatcaagcttctgtctcgcaacagcttcagacgcagaacgctagtggaagaccgtttgacgtaattcacacagagagcgttgggcttctccacacaagagccaagaatctccgtaacgtggtcgcgtcttggcatggaatcgcttacgaaacttttcactctgacatcatccaagaactccttcgtcaagcagacatcgccgccgccaccgctgctggaaccgaagaagaacagccaccgccttcatcgccagctctgacggagcgagcgaagcgagtcgtcgaggaagtcaaattcttccaacgttacgctcaccacgtggcaactagcgatcactgcggtgacgtactcaagaggatttacatgattccggaggaacgtgtccatatcattctaaacggcgtcgacgagaacgttttcaaaccggacgtttcaaaacgtgagagctttagagagaaatttggcgttagaagcggcaagaacaagaaatctcctctggttttgggaattgcagggaggttagtgagagataaaggtcatcctttgatgttctcagctttgaagcgagtgtttgaagaaaacaaggaggcacgtggaaacgttgtcgttttggtagctggagatggtccatggggaaacagatataaagacctcgggtctactaatgtgattgttcttggaccgttggatcaagaaaagctaggggattctacaacgcgatcgatgtgtttgtgaatccgacccttcgagctcaagggctggatcacactctcttggaagccatggtttcaggaaaaccggtcttagctactaggctagcgagtatcactgggtcggtggttgtcggtccacatttgggatatactttctcaccaaatgttgagtctcttaccgaggcgattttgcgggttgttagcgatggaacagaggaattacagaggaaaggcaaggaagcgcgtgaacggtcgttgaggcttttcacggcgactaaaatggctgattcatatgaaaggttttttctttgcatttcggatcagaggttttgtacgttacaagcttaaaacatttgagctataacactaatatagttaaaactaatcaaggacttgattgtttgatttcatc

SEQ ID NO: 108092 - protein, 409 aa, Arabidopsis thaliana
  peptide (1)..(409): Ceres Seq. ID no. 13653187
VTFWVSRFDLSLPMARENPLMSFSFSFRYLCHFALLLSLLSFVSFLFRHNTSLCSCLYDHNTYVNTFDHQQNNETIDLLRFSSAWNHLTFPSKPKKTLKIAVVVKKWPRKSQAGGLERHALTLHLALANRGHELHVFTAASPSFPEYQLKNLMFHLSEPTAAGYLDQASVSQQLQTQNASGRPFDVIHTESVGLLHTRAKNLRNVVASWHGIAYETFHSDIIQELLRQADIAAATAAGTEEEQPPPSSPALTERAKRVVEEVKFFQRYAHHVATSDHCGDVLKRIYMIPEERVHIILNGVDENVFKPDVSKRESFREKFGVRSGKNKKSPLVLGIAGRLVRDKGHPLMFSALKRVFEENKEARGNVVVLVAGDGPWGNRYKDLGSTNVIVLGPLDQEKLGDSTTRSMCL

SEQ ID NO: 108093 - protein, 396 aa, Arabidopsis thaliana
  peptide (1)..(396): Ceres Seq. ID no. 13653188
MARENPLMSFSFSFRYLCHFALLLSLLSFVSFLFRHNTSLCSCLYDHNTYVNTFDHQQNNETIDLLRFSSAWNHLTFPSKPKKTLKIAVVVKKWPRKSQAGGLERHALTLHLALANRGHELHVFTAASPSFPEYQLKNLMFHLSEPTAAGYLDQASVSQQLQTQNASGRPFDVIHTESVGLLHTRAKNLRNVVASWHGIAYETFHSDIIQELLRQADIAAATAAGTEEEQPPPSSPALTERAKRVVEEVKFFQRYAHHVATSDHCGDVLKRIYMIPEERVHIILNGVDENVFKPDVSKRESFREKFGVRSGKNKKSPLVLGIAGRLVRDKGHPLMFSALKRVFEENKEARGNVVVLVAGDGPWGNRYKDLGSTNVIVLGPLDQEKLGDSTTRSMCL

SEQ ID NO: 108094 - protein, 389 aa, Arabidopsis thaliana
  peptide (1)..(389): Ceres Seq. ID no. 13653189
MSFSFSFRYLCHFALLLSLLSFVSFLFRHNTSLCSCLYDHNTYVNTFDHQQNNETIDLLRFSSAWNHLTFPSKPKKTLKIAVVVKKWPRKSQAGGLERHALTLHLALANRGHELHVFTAASPSFPEYQLKNLMFHLSEPTAAGYLDQASVSQQLQTQNASGRPFDVIHTESVGLLHTRAKNLRNVVASWHGIAYETFHSDIIQELLRQADIAAATAAGTEEEQPPPSSPALTERAKRVVEEVKFFQRYAHHVATSDHCGDVLKRIYMIPEERVHIILNGVDENVFKPDVSKRESFREKFGVRSGKNKKSPLVLGIAGRLVRDKGHPLMFSALKRVFEENKEARGNVVVLVAGDGPWGNRYKDLGSTNVIVLGPLDQEKLGDSTTRSMCL

SEQ ID NO: 108095 - DNA, 1633 bp, Arabidopsis thaliana
  misc_feature (1)..(1633): Ceres Seq. ID no. 13653190
  misc_feature (1)..(1633): Ortholog of  Ceres SEQ ID NO 13596034 as cited in SEQ ID NO 62066
cggctggaaaatgtgggaagatgaaaaaagcttattgattaacttggatgagcaagggtgacaatggctagctccaagggatcacagagtgttagaaacttgatgtacccgggaaagcatgctttgctcccaccaaaaataccgtttcctagtgtatcagcatcgtattccgagtatattcctactggtttgattggttcaagacatggtcagaagcttagtaatgagaaaacacatcaccagcgaacttcctccgagagccatttggtagaagagcttcccttttggcttgatgatcttctcaatgagcagccggaaagccctgctcgaaaatgtggtcatcggcgttcatcaagtgactcttacgcttatctagatgtggctaatgctacaaacataagtttgactctccaaaatgatttcagttataggaatactgttttatccactcaaagaggagtccaagagcttgaccggaataaaaatgctcaggatgctgccttctactctggtgctagttttctgaaacagaagagtcgtcagcgggattctttggtggcaactggggcttgtccttcttggttacctttcgctcgtgagaacggtggcggaaaaaacttgggagctttatatatgtctcaagatgcaacagtaatatcgtcagaaagaaagaactatgctgaacctttttctcatgacccaaagatgttatcttctgaggaaaacaactccaatccttcgcctgtgacttatgaagctgacaacacaaaacgagccaaacagcaatttgcacaaagatcacgggtccgtaagctccagtacatatctgagctagaaagaaatgtacagacattgcaggcagaaggctccaaagtttcagctgaacttgattttctcaaccagaggaatcttattctgagtatggaaaataaagctctcaagaagcgtctcgaaagtatagctcaggagaagcttatcaaacaattggaacaagaagtgttggaaaaggagattgggagactacgagcgttgtatcagcaacaacaacaaactcaaaaaccatcagccagtcgcggacgtgctactagcaaagatctcgactctcagttctccagtctttcactgaacaccaaagattccaactgtaggcgtgactctgtatctgtgatgggtcaattcaacttttagtaaatgtctctctacccactggttcattagagatcttaagggcctggcgactcaacaagatcagacccttatctaccgcctcaccacagacgtttttaactcccccgtcgtttctttttttttcttttcttatggttgacaagttaactcaccagtgcacctggaaatcctatattacttccaggagatggcttgcctgaggtggtttagttcgaagatcagacacctggacttcatttatctggtgattgttgtagcgacttgtgtaatatatgggacgaatatattcgaacccggactcatctctggagttgtactatgatacccactgttgtattttatgttacttgtaaaatggtgcattcccttcgagtgaatgcttcatgtaaagttgttgccattttctgtagtactatccccaagcgtcaaaatatttgattgcccc

SEQ ID NO: 108096 - protein, 374 aa, Arabidopsis thaliana
  peptide (1)..(374): Ceres Seq. ID no. 13653191
MASSKGSQSVRNLMYPGKHALLPPKIPFPSVSASYSEYIPTGLIGSRHGQKLSNEKTHHQRTSSESHLVEELPFWLDDLLNEQPESPARKCGHRRSSSDSYAYLDVANATNISLTLQNDFSYRNTVLSTQRGVQELDRNKNAQDAAFYSGASFLKQKSRQRDSLVATGACPSWLPFARENGGGKNLGALYMSQDATVISSERKNYAEPFSHDPKMLSSEENNSNPSPVTYEADNTKRAKQQFAQRSRVRKLQYISELERNVQTLQAEGSKVSAELDFLNQRNLILSMENKALKKRLESIAQEKLIKQLEQEVLEKEIGRLRALYQQQQQTQKPSASRGRATSKDLDSQFSSLSLNTKDSNCRRDSVSVMGQFNF

SEQ ID NO: 108097 - protein, 361 aa, Arabidopsis thaliana
  peptide (1)..(361): Ceres Seq. ID no. 13653192
MYPGKHALLPPKIPFPSVSASYSEYIPTGLIGSRHGQKLSNEKTHHQRTSSESHLVEELPFWLDDLLNEQPESPARKCGHRRSSSDSYAYLDVANATNISLTLQNDFSYRNTVLSTQRGVQELDRNKNAQDAAFYSGASFLKQKSRQRDSLVATGACPSWLPFARENGGGKNLGALYMSQDATVISSERKNYAEPFSHDPKMLSSEENNSNPSPVTYEADNTKRAKQQFAQRSRVRKLQYISELERNVQTLQAEGSKVSAELDFLNQRNLILSMENKALKKRLESIAQEKLIKQLEQEVLEKEIGRLRALYQQQQQTQKPSASRGRATSKDLDSQFSSLSLNTKDSNCRRDSVSVMGQFNF

SEQ ID NO: 108098 - DNA, 1570 bp, Arabidopsis thaliana
  misc_feature (1)..(1570): Ceres Seq. ID no. 13653201
  misc_feature (1)..(1570): Ortholog of  Ceres SEQ ID NO 15169199 as cited in SEQ ID NO 55297
  misc_feature (1)..(1570): Ortholog of  Ceres SEQ ID NO 15175690 as cited in SEQ ID NO 55466
  misc_feature (1)..(1570): Ortholog of  Ceres SEQ ID NO 15171197 as cited in SEQ ID NO 56892
gtccgaatcttcttcgcgtctctcaccaacaccacttctcctaccttcttcttcacaccaaatgattctctcgtataatattcatcaaacccagatcatgttttcatcatcaatcatctcttaaactcctctatagatctcaccgcatgacgttccgaagtttactccaggaaatgcggtctaggccacaccgtgtagttcacgccgccgcctcaaccgctaatagttcagaccctttcagctggtcggagctcccggaggagctgcttagagaaatcctgattagggttgagactgttgacggcggcgattggccgtcgcggcgaaacgtggtggcttgtgccggcgtttgtcgtagctggaggattctcaccaaggagattgtagctgttcctgaattctcctctaaattgactttccctatctccctcaagcagtctggtccaagagattctctagttcaatgctttataaaacgtaatcgaaatactcaatcgtatcatctctatctcggattaactacctctttgacggataacgggaagtttcttcttgctgcttctaagctgaagcgcgcaacttgcactgattacatcatctctttgcgttcagacgatatctcaaagagaagcaacgcgtatcttgggagaatgagatcgaacttccttggaacaaaattcacggtctttgatggtagtcagaccggagcagcgaagatgcagaagagccgctcttctaatttcatcaaagtttcacctagagttcctcagggaagttaccccatcgctcacatttcatacgagttaaacgtcttaggctctcggtaaacagtttttacattcaagtatgataatgcttcttctagtcttttgaccattctgattttaacagtcttttgagggtattaataacaggggaccgagaagaatgcgttgcatcatggatacaatacctatgagcatcgtggagtcgcgaggagtagtagcttcaacatccataagctctttttccagtcagtcatcaccagtctttaggtctcactcaaaaccattgcgcagtaatagtgcatcatgtagcgactcaggcaacaacctgggagatccaccattggtgctgagcaacaaagctccacggtggcatgagcagttacgttgctggtgcttaaatttccatggtcgagtcacagtggcttcggttaagaactttcagcttgtggcagttagtgactgtgaagcagggcagacatctgagaggatcatactccagtttgggaaagttgggaaggacatgtttaccatggattatggatatccgatttctgcgtttcaagcgtttgctatctgcctgagcagttttgaaaccagaattgcctgtgaataatgaagagactaaccttaaatcacctccgtgtgctcgttgttgtggtctgtagatggtgtagtacttgtccaaaatctcaggaacgttaatagctttctctggattctttctgacaattcaaatctatctgttgtatttatttgtctttcatgcaaagaagcgtaccagaaataggctacgattacgtttt

SEQ ID NO: 108099 - protein, 226 aa, Arabidopsis thaliana
  peptide (1)..(226): Ceres Seq. ID no. 13653202
MTFRSLLQEMRSRPHRVVHAAASTANSSDPFSWSELPEELLREILIRVETVDGGDWPSRRNVVACAGVCRSWRILTKEIVAVPEFSSKLTFPISLKQSGPRDSLVQCFIKRNRNTQSYHLYLGLTTSLTDNGKFLLAASKLKRATCTDYIISLRSDDISKRSNAYLGRMRSNFLGTKFTVFDGSQTGAAKMQKSRSSNFIKVSPRVPQGSYPIAHISYELNVLGSR

SEQ ID NO: 108100 - protein, 217 aa, Arabidopsis thaliana
  peptide (1)..(217): Ceres Seq. ID no. 13653203
MRSRPHRVVHAAASTANSSDPFSWSELPEELLREILIRVETVDGGDWPSRRNVVACAGVCRSWRILTKEIVAVPEFSSKLTFPISLKQSGPRDSLVQCFIKRNRNTQSYHLYLGLTTSLTDNGKFLLAASKLKRATCTDYIISLRSDDISKRSNAYLGRMRSNFLGTKFTVFDGSQTGAAKMQKSRSSNFIKVSPRVPQGSYPIAHISYELNVLGSR

SEQ ID NO: 108101 - protein, 150 aa, Arabidopsis thaliana
  peptide (1)..(150): Ceres Seq. ID no. 13653204
MRCIMDTIPMSIVESRGVVASTSISSFSSQSSPVFRSHSKPLRSNSASCSDSGNNLGDPPLVLSNKAPRWHEQLRCWCLNFHGRVTVASVKNFQLVAVSDCEAGQTSERIILQFGKVGKDMFTMDYGYPISAFQAFAICLSSFETRIACE

SEQ ID NO: 108102 - DNA, 1707 bp, Arabidopsis thaliana
  misc_feature (1)..(1707): Ceres Seq. ID no. 13653205
  misc_feature (1)..(1707): Ortholog of  Ceres SEQ ID NO 14303366 as cited in SEQ ID NO 54418
  misc_feature (1)..(1707): Ortholog of  Ceres SEQ ID NO 13503610 as cited in SEQ ID NO 62416
  misc_feature (1)..(1707): Ortholog of  Ceres SEQ ID NO 13657610 as cited in SEQ ID NO 66165
  misc_feature (1)..(1707): Ortholog of  Ceres SEQ ID NO 13598312 as cited in SEQ ID NO 68448
  misc_feature (1)..(1707): Ortholog of  Ceres SEQ ID NO 13596100 as cited in SEQ ID NO 68573
atcataggcatagcaaaactcttccaaaatgtctgatttctcgagctccgtgaagcttaaatatgttaaactcggttaccaataccttatcaacaacttccttactcttcttttgattccagtcatagcaaccgtcgccatcgagcttctccgaatgggtccggaagagattctcagtgtcttgaactcactccacttcgagcttcttcatatcctttgttcctctttccttattatctttgtttcaaccgtttacttcatgtccaagccacgtaccgtctaccttgtggactactcttgctacaaacctcctgtcacgtgccgtgtcccgttctcttcgttcatggaacactctcgtctcatcctcaaagacaatcccaagagtgtcgaattccaaatgagaatcctcgagcgatcaggtctaggagaagagacttgtctccctccagctattcattacatccctccaactccaaccatggaatccgcaagaaacgaggcccaaatggttatcttcaccgccatggaagatctcttcaagaatacaggtcttaaacctaaagacatcgacatcctcattgttaattgctctctgttctcaccaacgccgtctctctccgctatgattatcaacaagtacaagcttaggagtaacatcaaaagctataacctttccgggatgggatgcagcgctagtcttatctcagttgatgtagcacgtgatttgttacaagtccatcctaactccaacgcaatcataattagcactgagatcattactcctaattactataagggtaatgagagagccatgttgctcccaaactgcctcttccgtatgggaggcgccgccattctcctctctaaccgcagatccgacaggtggcgagctaagtacaagttatgccaccttgttaggacccatcgcggtgcggatgacaaatcctacaactgtgttatggaacaggaagacaaaaatggtaacgtgggaatcaacttgtctaaagatctcatgaccattgccggagaagccttgaaagctaatatcactaccataggtcctttggtccttccggcatcggagcagcttctcttcctctcatcccttatcggacgtaaaatcttcaatccaaagtggaagccgtacataccagatttcaagcaggccttcgagcatttctgcatccacgcaggaggaagagcggtgattgatgagctgcaaaagaatctacagctgtcgggagaacacgtggaagcttcaagaatgacactacataggtttggtaatacatcgtcgtcatcattatggtatgagcttagctacatagaggctcaagggagaatgaagagaaacgatagggtttggcagatcgctttcggaagtggattcaagtgtaactccgccgtttggaaatgtaaccgtacgatcaagacaccaacggatggagcgtggtcggattgtatcgaacgataccctgtctttatccctgaagttgttaaactatgaaaatactttttttttatccttgaagttgttgaactatgaaaacacttttaaaagattgggaaaatagagaaaactgcaaaagacgataagatacaacacatgttctaataactgcgtcaactttttcatttggtgtattttattctttatactttctaatgatgtgatttgtgatgtatgaaatactaaaattttattcc

SEQ ID NO: 108103 - protein, 492 aa, Arabidopsis thaliana
  peptide (1)..(492): Ceres Seq. ID no. 13653206
MSDFSSSVKLKYVKLGYQYLINNFLTLLLIPVIATVAIELLRMGPEEILSVLNSLHFELLHILCSSFLIIFVSTVYFMSKPRTVYLVDYSCYKPPVTCRVPFSSFMEHSRLILKDNPKSVEFQMRILERSGLGEETCLPPAIHYIPPTPTMESARNEAQMVIFTAMEDLFKNTGLKPKDIDILIVNCSLFSPTPSLSAMIINKYKLRSNIKSYNLSGMGCSASLISVDVARDLLQVHPNSNAIIISTEIITPNYYKGNERAMLLPNCLFRMGGAAILLSNRRSDRWRAKYKLCHLVRTHRGADDKSYNCVMEQEDKNGNVGINLSKDLMTIAGEALKANITTIGPLVLPASEQLLFLSSLIGRKIFNPKWKPYIPDFKQAFEHFCIHAGGRAVIDELQKNLQLSGEHVEASRMTLHRFGNTSSSSLWYELSYIEAQGRMKRNDRVWQIAFGSGFKCNSAVWKCNRTIKTPTDGAWSDCIERYPVFIPEVVKL

SEQ ID NO: 108104 - protein, 450 aa, Arabidopsis thaliana
  peptide (1)..(450): Ceres Seq. ID no. 13653207
MGPEEILSVLNSLHFELLHILCSSFLIIFVSTVYFMSKPRTVYLVDYSCYKPPVTCRVPFSSFMEHSRLILKDNPKSVEFQMRILERSGLGEETCLPPAIHYIPPTPTMESARNEAQMVIFTAMEDLFKNTGLKPKDIDILIVNCSLFSPTPSLSAMIINKYKLRSNIKSYNLSGMGCSASLISVDVARDLLQVHPNSNAIIISTEIITPNYYKGNERAMLLPNCLFRMGGAAILLSNRRSDRWRAKYKLCHLVRTHRGADDKSYNCVMEQEDKNGNVGINLSKDLMTIAGEALKANITTIGPLVLPASEQLLFLSSLIGRKIFNPKWKPYIPDFKQAFEHFCIHAGGRAVIDELQKNLQLSGEHVEASRMTLHRFGNTSSSSLWYELSYIEAQGRMKRNDRVWQIAFGSGFKCNSAVWKCNRTIKTPTDGAWSDCIERYPVFIPEVVKL

SEQ ID NO: 108105 - protein, 415 aa, Arabidopsis thaliana
  peptide (1)..(415): Ceres Seq. ID no. 13653208
MSKPRTVYLVDYSCYKPPVTCRVPFSSFMEHSRLILKDNPKSVEFQMRILERSGLGEETCLPPAIHYIPPTPTMESARNEAQMVIFTAMEDLFKNTGLKPKDIDILIVNCSLFSPTPSLSAMIINKYKLRSNIKSYNLSGMGCSASLISVDVARDLLQVHPNSNAIIISTEIITPNYYKGNERAMLLPNCLFRMGGAAILLSNRRSDRWRAKYKLCHLVRTHRGADDKSYNCVMEQEDKNGNVGINLSKDLMTIAGEALKANITTIGPLVLPASEQLLFLSSLIGRKIFNPKWKPYIPDFKQAFEHFCIHAGGRAVIDELQKNLQLSGEHVEASRMTLHRFGNTSSSSLWYELSYIEAQGRMKRNDRVWQIAFGSGFKCNSAVWKCNRTIKTPTDGAWSDCIERYPVFIPEVVKL

SEQ ID NO: 108106 - DNA, 1465 bp, Arabidopsis thaliana
  misc_feature (1)..(1465): Ceres Seq. ID no. 13653213
  misc_feature (1)..(1465): Ortholog of  Ceres SEQ ID NO 14311367 as cited in SEQ ID NO 53834
atggtggataccgaaatgcaagagcaagatgtgacttttggtgcccttgttgagacaaagtatttagaggaagaacctttggagccagaaaatgatcacaaccctagtgaaatcccgcagccccttcttcttggagatggtcaggctaataatggtcatggcatgaatggtggtgctgttggagttgttgaccactctgaaaggaagactcgtagggtgcaaatgttgagtcctaagactgaaggtgagaatgccaaaaagaggaagacttggctgctggattctgaggcacagggaactgatgaagcagggacaccggtagaacaagtggcgtttctaagagaagtggaggccttttacaaagagagtttcctggaatttaaacctcctaagttttatggacagcctttaaacattctcaagctttggcgagcagtcgtgaacctaggtggctatgaagtggtcaccacaaataagctgtggcggcaagttggagaatccttcaatcctcccaagacatgcacaacagtctcctacacattccgcaatttctatgagaaggcacttttggagtacgaaaagtgtttaaggaataatggtgagcttaaccttcctggttcaacattgattctgtcttccagtgtcgagaaagagccaagtagccatcaaggttcagggtcaggcagggcacgaagagattctgcagctcgtgctatgcaaggttggcatgcgcagcgccttgttggatctggagaggttactgcgcctgctgttaaggataagggcttaatttccaccccaaagcacaagaaactcaaaagcattgggctgcaaaaacacaaacaacaaactagcatggaccatgttgttacaaatgaagctgacaaacagttggctgctgaggttgttgatgttggacccgttgctgactgggtgaagataaatgtcaaagaatctaaggattccttcgagatatttgccttggtacctggacttcttcgcaaagaggttcgaattcaatcagatcctgcgggaaaggtggttataacaggccagccagagcagcttgacaatccttgggggattacacccttcaaaaagattgttgacttatcagcaagaattgatccgcttcacacatccgcggtcatgagcatgcatggacggttgttcatacgagttccgtttgagcagtaatggatttcaagagagctggtcagttgttcgtggtttcttctaggaattcatatgtttcagaaccaaattgttaggcggctgaagcagttttgtaactgtgatttgaatctgaagactgaagttaggaacatgcaacaaacatttgatcttactgtaatatttctcttttgtataatttgagattagtaggagaaactgctccaaagacatttaggatgcaaccaacaatgatgattttgatctaaaatcggaatgttatgcttttccc

SEQ ID NO: 108107 - protein, 398 aa, Arabidopsis thaliana
  peptide (1)..(398): Ceres Seq. ID no. 13653214
MVDTEMQEQDVTFGALVETKYLEEEPLEPENDHNPSEIPQPLLLGDGQANNGHGMNGGAVGVVDHSERKTRRVQMLSPKTEGENAKKRKTWLLDSEAQGTDEAGTPVEQVAFLREVEAFYKESFLEFKPPKFYGQPLNILKLWRAVVNLGGYEVVTTNKLWRQVGESFNPPKTCTTVSYTFRNFYEKALLEYEKCLRNNGELNLPGSTLILSSSVEKEPSSHQGSGSGRARRDSAARAMQGWHAQRLVGSGEVTAPAVKDKGLISTPKHKKLKSIGLQKHKQQTSMDHVVTNEADKQLAAEVVDVGPVADWVKINVKESKDSFEIFALVPGLLRKEVRIQSDPAGKVVITGQPEQLDNPWGITPFKKIVDLSARIDPLHTSAVMSMHGRLFIRVPFEQ

SEQ ID NO: 108108 - protein, 393 aa, Arabidopsis thaliana
  peptide (1)..(393): Ceres Seq. ID no. 13653215
MQEQDVTFGALVETKYLEEEPLEPENDHNPSEIPQPLLLGDGQANNGHGMNGGAVGVVDHSERKTRRVQMLSPKTEGENAKKRKTWLLDSEAQGTDEAGTPVEQVAFLREVEAFYKESFLEFKPPKFYGQPLNILKLWRAVVNLGGYEVVTTNKLWRQVGESFNPPKTCTTVSYTFRNFYEKALLEYEKCLRNNGELNLPGSTLILSSSVEKEPSSHQGSGSGRARRDSAARAMQGWHAQRLVGSGEVTAPAVKDKGLISTPKHKKLKSIGLQKHKQQTSMDHVVTNEADKQLAAEVVDVGPVADWVKINVKESKDSFEIFALVPGLLRKEVRIQSDPAGKVVITGQPEQLDNPWGITPFKKIVDLSARIDPLHTSAVMSMHGRLFIRVPFEQ

SEQ ID NO: 108109 - protein, 344 aa, Arabidopsis thaliana
  peptide (1)..(344): Ceres Seq. ID no. 13653216
MNGGAVGVVDHSERKTRRVQMLSPKTEGENAKKRKTWLLDSEAQGTDEAGTPVEQVAFLREVEAFYKESFLEFKPPKFYGQPLNILKLWRAVVNLGGYEVVTTNKLWRQVGESFNPPKTCTTVSYTFRNFYEKALLEYEKCLRNNGELNLPGSTLILSSSVEKEPSSHQGSGSGRARRDSAARAMQGWHAQRLVGSGEVTAPAVKDKGLISTPKHKKLKSIGLQKHKQQTSMDHVVTNEADKQLAAEVVDVGPVADWVKINVKESKDSFEIFALVPGLLRKEVRIQSDPAGKVVITGQPEQLDNPWGITPFKKIVDLSARIDPLHTSAVMSMHGRLFIRVPFEQ

SEQ ID NO: 108110 - DNA, 3478 bp, Arabidopsis thaliana
  misc_feature (1)..(3478): Ceres Seq. ID no. 13653217
  misc_feature (1)..(3478): Ortholog of  Ceres SEQ ID NO 13600310 as cited in SEQ ID NO 5086
  misc_feature (1)..(3478): Ortholog of  Ceres SEQ ID NO 14316099 as cited in SEQ ID NO 52473
ctcaactttttttcttttctaattaaatctctcattaccttttaaatctatccccaaacttgttaaccaaaaaaaacagagaagaaatctcccaaatcctctttttttttgtttgttctaccgtttctcatatatctctctgtctccgatcttatttggatcggactagtgtcattggcagtgaagtttcattgactttggggttttcgcttttgatgctgtgagcttattattattgttattacggagttgatggcggctactgcgacggaggatggaggattaagcttcactgtggcttcagtaatggaggatgtgttgcagcaacatggaaatgggcttagagatcatgatttagtgtctcgtcgagctgaagaagctgcatcgaggagatatgaggcggctaattggctgagaaggatggttggagttgttggagctaaggatttgcctgcagagccaacagaagaagggcttaggcttggtttaagaagtggaattatcctttgtaaagtcctcaataaggttcaacctggagctgtctcaaaggttgtggaaagtccttgtgatgccattcttgttgcggatggagctccgttatcagcatttcagtattttgagaatgttaggaactttcttgttgctatacaggaaatggggtttccaacatttgaggcatctgatctcgagcaaggaggaaatgcttctcgagttgtgaattgtgttttggctatcaaatcatatgatgaatggaaacaaagtggtggaattggagtttggaaatttggtggcaacattaagcctcctgcacttgggaagtcatcttttgtcagaaaaaactcagagccattcatgaactctttatcgagaacctcctcgatcaacaatgagaaagctccctctgagaatgattctaacaagctgtccagtcccagttccttgagcacacttgttcgcgctgttctatcagataaaaagcctgaggatgtgcccaaactgattgaatctctgctgagtaaagtagtcgaagagtttgaaaatcgagttacaaatcagtatgagttggttagagcagctccaagagaatcaacttcgtcacagaacaacagatcatttcttaaacctcttggtgaaagagagagggaagagaagagtttcaaagcaataaagaaagatgatcacaatagtcagattcttgacgaaaagatgaaaactcgccaatttaaacaactgacaatcttcaaccaacaacaagaagatatagaaggactaagacagacgctctacacaacaagggctggtatgcaatttatgcagaagaaatttcaagaagagttctcttctcttggtatgcacgttcatggccttgctcatgctgcttctggctatcaccgagttcttgaagaaaaccgaaaactttataatcaagtgcaggatctcaagggtagcatccgtgtttattgtcgggtgcggccatttttgcctggacaatccagcttttctagtacaattgggaacatggaggatgataccatagggatcaatactgcatctagacatggaaaatcactcaaatccttcactttcaacaaagtctttggcccatctgcaactcaagaagaggtattttctgatatgcagccattgatccgttctgttcttgatggatacaatgtctgcatatttgcatatggtcaaactggatcaggaaaaacattcacaatgagtggaccaagagatctaacggagaagagccagggagttaattacagagcacttggtgatctgtttcttcttgctgaacaaagaaaagacacattccgctacgatattgcagttcagatgattgagatttacaatgagcaagttagagaccttttggttactgatggaagcaataaaaggttagagatcaggaatagctctcaaaagggtctaagtgtaccggatgcaagtcttgttccagtctcttcaacatttgatgttattgatctaatgaaaactgggcacaagaatcgagccgttggatcaacagccttgaatgatcgaagcagtcgttctcatagctgcttgactgttcatgttcaaggaagagacttgacttcaggagctgtgcttcgaggatgcatgcatcttgtggatctagcaggcagtgagagggtagacaaatccgaggttactggagacagactaaaagaagcacagcacatcaatagatcgctctctgctttaggagatgtgattgcttcgctagctcacaagaacccacatgttccttacagaaacagcaaactcacacaactccttcaggactctcttggaggacaagcaaagacattgatgtttgtccacattagtcctgaggcagatgcagttggggaaacaataagcactttgaagtttgcagagagagtagctacggttgagcttggggctgcacgagtgaacaatgatacttcagatgttaaggaactcaaagaacagattgctactcttaaagcagcactcgcgagaaaagaagcagagtcacagcagaacaacatcttgaaaactcctggtggctctgagaaatacaaagccaaaactggtgaagtagagattcataacaataacatcatgacaaagaaatctgagagttgtgaagtggaggagattacagtgaactcaccaccttggccaccagtagcaagtccaggacaagcctacagagaggatgaccgaagtttcgggtccagcgagtgggttgacaaggtgatggtgaataacagacaagacgagatgagaagagtggagagtctttggggaggagccacaacagagaatggtattggtattctgccggaagatttttacaggagagatttggcttcagacacttcaagaatattctctgaacattcttacaacatcttcatgggaaacaacaacagcacagacgatctagatgcagccacaagtgactcatctgagccagatttgctctggcaattcaaccagtccaccaagatacctacaagaagcaatattgagtcaaaactcaagaaacccgtctcaaaacctataagaagtcctcaatccaggaacaactcaaacaacacggtttcacgtcctttggcttcacagaaggtagggaatggtcctcgtggcatgaaacagttcggtcctgctgatatgaagcggaaagctactaacgccagacattgaaggccactcactcacacggatacatacatacacactcacatggcttcttattggttttgatttgtttatttttcatccattggtttttattgtttcttcttctctcgtttggttgtgcgagcttttatatacataacacagacaaagacaatagctagacaatgcaacaacagtttcttcttgttgctctctttcttgggttttgttttacttttctgttctatgtatattcttccactagctgaacataaaaaatatgaaagatttgtttgct

SEQ ID NO: 108111 - protein, 983 aa, Arabidopsis thaliana
  peptide (1)..(983): Ceres Seq. ID no. 13653218
MAATATEDGGLSFTVASVMEDVLQQHGNGLRDHDLVSRRAEEAASRRYEAANWLRRMVGVVGAKDLPAEPTEEGLRLGLRSGIILCKVLNKVQPGAVSKVVESPCDAILVADGAPLSAFQYFENVRNFLVAIQEMGFPTFEASDLEQGGNASRVVNCVLAIKSYDEWKQSGGIGVWKFGGNIKPPALGKSSFVRKNSEPFMNSLSRTSSINNEKAPSENDSNKLSSPSSLSTLVRAVLSDKKPEDVPKLIESLLSKVVEEFENRVTNQYELVRAAPRESTSSQNNRSFLKPLGEREREEKSFKAIKKDDHNSQILDEKMKTRQFKQLTIFNQQQEDIEGLRQTLYTTRAGMQFMQKKFQEEFSSLGMHVHGLAHAASGYHRVLEENRKLYNQVQDLKGSIRVYCRVRPFLPGQSSFSSTIGNMEDDTIGINTASRHGKSLKSFTFNKVFGPSATQEEVFSDMQPLIRSVLDGYNVCIFAYGQTGSGKTFTMSGPRDLTEKSQGVNYRALGDLFLLAEQRKDTFRYDIAVQMIEIYNEQVRDLLVTDGSNKRLEIRNSSQKGLSVPDASLVPVSSTFDVIDLMKTGHKNRAVGSTALNDRSSRSHSCLTVHVQGRDLTSGAVLRGCMHLVDLAGSERVDKSEVTGDRLKEAQHINRSLSALGDVIASLAHKNPHVPYRNSKLTQLLQDSLGGQAKTLMFVHISPEADAVGETISTLKFAERVATVELGAARVNNDTSDVKELKEQIATLKAALARKEAESQQNNILKTPGGSEKYKAKTGEVEIHNNNIMTKKSESCEVEEITVNSPPWPPVASPGQAYREDDRSFGSSEWVDKVMVNNRQDEMRRVESLWGGATTENGIGILPEDFYRRDLASDTSRIFSEHSYNIFMGNNNSTDDLDAATSDSSEPDLLWQFNQSTKIPTRSNIESKLKKPVSKPIRSPQSRNNSNNTVSRPLASQKVGNGPRGMKQFGPADMKRKATNARH

SEQ ID NO: 108112 - protein, 965 aa, Arabidopsis thaliana
  peptide (1)..(965): Ceres Seq. ID no. 13653219
MEDVLQQHGNGLRDHDLVSRRAEEAASRRYEAANWLRRMVGVVGAKDLPAEPTEEGLRLGLRSGIILCKVLNKVQPGAVSKVVESPCDAILVADGAPLSAFQYFENVRNFLVAIQEMGFPTFEASDLEQGGNASRVVNCVLAIKSYDEWKQSGGIGVWKFGGNIKPPALGKSSFVRKNSEPFMNSLSRTSSINNEKAPSENDSNKLSSPSSLSTLVRAVLSDKKPEDVPKLIESLLSKVVEEFENRVTNQYELVRAAPRESTSSQNNRSFLKPLGEREREEKSFKAIKKDDHNSQILDEKMKTRQFKQLTIFNQQQEDIEGLRQTLYTTRAGMQFMQKKFQEEFSSLGMHVHGLAHAASGYHRVLEENRKLYNQVQDLKGSIRVYCRVRPFLPGQSSFSSTIGNMEDDTIGINTASRHGKSLKSFTFNKVFGPSATQEEVFSDMQPLIRSVLDGYNVCIFAYGQTGSGKTFTMSGPRDLTEKSQGVNYRALGDLFLLAEQRKDTFRYDIAVQMIEIYNEQVRDLLVTDGSNKRLEIRNSSQKGLSVPDASLVPVSSTFDVIDLMKTGHKNRAVGSTALNDRSSRSHSCLTVHVQGRDLTSGAVLRGCMHLVDLAGSERVDKSEVTGDRLKEAQHINRSLSALGDVIASLAHKNPHVPYRNSKLTQLLQDSLGGQAKTLMFVHISPEADAVGETISTLKFAERVATVELGAARVNNDTSDVKELKEQIATLKAALARKEAESQQNNILKTPGGSEKYKAKTGEVEIHNNNIMTKKSESCEVEEITVNSPPWPPVASPGQAYREDDRSFGSSEWVDKVMVNNRQDEMRRVESLWGGATTENGIGILPEDFYRRDLASDTSRIFSEHSYNIFMGNNNSTDDLDAATSDSSEPDLLWQFNQSTKIPTRSNIESKLKKPVSKPIRSPQSRNNSNNTVSRPLASQKVGNGPRGMKQFGPADMKRKATNARH

SEQ ID NO: 108113 - protein, 927 aa, Arabidopsis thaliana
  peptide (1)..(927): Ceres Seq. ID no. 13653220
MVGVVGAKDLPAEPTEEGLRLGLRSGIILCKVLNKVQPGAVSKVVESPCDAILVADGAPLSAFQYFENVRNFLVAIQEMGFPTFEASDLEQGGNASRVVNCVLAIKSYDEWKQSGGIGVWKFGGNIKPPALGKSSFVRKNSEPFMNSLSRTSSINNEKAPSENDSNKLSSPSSLSTLVRAVLSDKKPEDVPKLIESLLSKVVEEFENRVTNQYELVRAAPRESTSSQNNRSFLKPLGEREREEKSFKAIKKDDHNSQILDEKMKTRQFKQLTIFNQQQEDIEGLRQTLYTTRAGMQFMQKKFQEEFSSLGMHVHGLAHAASGYHRVLEENRKLYNQVQDLKGSIRVYCRVRPFLPGQSSFSSTIGNMEDDTIGINTASRHGKSLKSFTFNKVFGPSATQEEVFSDMQPLIRSVLDGYNVCIFAYGQTGSGKTFTMSGPRDLTEKSQGVNYRALGDLFLLAEQRKDTFRYDIAVQMIEIYNEQVRDLLVTDGSNKRLEIRNSSQKGLSVPDASLVPVSSTFDVIDLMKTGHKNRAVGSTALNDRSSRSHSCLTVHVQGRDLTSGAVLRGCMHLVDLAGSERVDKSEVTGDRLKEAQHINRSLSALGDVIASLAHKNPHVPYRNSKLTQLLQDSLGGQAKTLMFVHISPEADAVGETISTLKFAERVATVELGAARVNNDTSDVKELKEQIATLKAALARKEAESQQNNILKTPGGSEKYKAKTGEVEIHNNNIMTKKSESCEVEEITVNSPPWPPVASPGQAYREDDRSFGSSEWVDKVMVNNRQDEMRRVESLWGGATTENGIGILPEDFYRRDLASDTSRIFSEHSYNIFMGNNNSTDDLDAATSDSSEPDLLWQFNQSTKIPTRSNIESKLKKPVSKPIRSPQSRNNSNNTVSRPLASQKVGNGPRGMKQFGPADMKRKATNARH

SEQ ID NO: 108114 - DNA, 1700 bp, Arabidopsis thaliana
  misc_feature (1)..(1700): Ceres Seq. ID no. 13653229
  misc_feature (1)..(1700): Ortholog of  Ceres SEQ ID NO 15170403 as cited in SEQ ID NO 53457
  misc_feature (1)..(1700): Ortholog of  Ceres SEQ ID NO 13660872 as cited in SEQ ID NO 60830
  misc_feature (1)..(1700): Ortholog of  Ceres SEQ ID NO 12616221 as cited in SEQ ID NO 63291
agcatttttcagcactcctttcctttcccccacaaactaaacaaaaaaccattaacaaaaaaaccattcacaaaaaaaatagagagaatcatctgagagagtagtagtgatgatatgatcgcttcttctcctacaatctcagaaacctccgatcacggttttagatatcttctacaacggatacaatggagagcaccgattcttccggtggtccaccaccgccacaacctaaccttcctccaggcttccggtttcaccctaccgacgaagagcttgttgttcactacctcaaacgcaaagcagcctctgctcctttacctgtcgccatcatcgccgaagtcgatctctataaatttgatccatgggaacttcccgctaaagcatcgtttggagaacaagaatggtacttctttagtccacgagatcggaagtatccaaacggagcaagaccaaacagagcggcgacttcaggttattggaaagcgaccggtacagataaaccggtacttgcttccgacggtaaccaaaaggtgggcgtgaagaaggcactagtcttctacagtggtaaaccaccaaaaggcgttaaaagtgattggatcatgcatgagtatcgtctcatcgaaaacaaaccaaacaatcgacctcctggctgtgatttcggcaacaaaaaaaactcactcagacttgatgattgggtgttatgtagaatctacaagaagaacaacgcaagtcgacatgttgataacgataaggatcatgatatgatcgattacattttcaggaagattcctccgtctttatcaatggcggctgcttctacaggacttcaccaacatcatcataatgtctcaagatcaatgaatttcttccctggcaaattctccggtggtggttacgggattttctctgacggtggtaacacgagtatatacgacggcggtggcatgatcaacaatattggtactgactcagtagatcacgacaataacgctgacgtcgttggtttaaatcatgcttcgtcgtcaggtcctatgatgatggcgaatttgaaacgaactctcccggtgccgtattggcctgtagcagatgaggagcaagatgcatctccgagcaaacggtttcacggtgtaggaggaggaggaggagattgttcgaacatgtcttcctccatgatggaagagactccaccattgatgcaacaacaaggtggtgtgttaggagatggattattcagaacgacatcgtaccaattacccggtttaaattggtactcttcttaatcaaatgtgtttcgccgccggtgtgaagaattttccggtgacagtgaagatttttttccgattggtggggtcatttgcatgcattatataatttgagatttgtgtatatgttttgggttaattaattggtcacaggggttagaggaagaagattatttagagagcggagaagaagtgaggcaacatatagaaaacataggtttaaaaaatattactgtttgttaagtttaatgattaaatgtataaatcttatacttagatgtttatatatagtttgtatagatgcatatagtttctctcaatgctattttgagattgtattttcttgtaaaggaaatgttttttaaaaaaaaaaaaaaaaagttgtgtaactatgtatttttcttcacatatgttgaaaatcactgatgtttttggact

SEQ ID NO: 108115 - protein, 364 aa, Arabidopsis thaliana; identical to SEQ ID NO: 30723
  peptide (1)..(364): Ceres Seq. ID no. 13653230

SEQ ID NO: 108116 - protein, 226 aa, Arabidopsis thaliana; identical to SEQ ID NO: 30724
  peptide (1)..(226): Ceres Seq. ID no. 13653231

SEQ ID NO: 108117 - DNA, 1073 bp, Arabidopsis thaliana
  misc_feature (1)..(1073): Ceres Seq. ID no. 13653232
  misc_feature (1)..(1073): Ortholog of  Ceres SEQ ID NO 13662054 as cited in SEQ ID NO 61539
  misc_feature (1)..(1073): Ortholog of  Ceres SEQ ID NO 13663665 as cited in SEQ ID NO 67230
  misc_feature (1)..(1073): Ortholog of  Ceres SEQ ID NO 15174315 as cited in SEQ ID NO 0
cgaccaaatacacatccgacggggaaaaagagttccgacaagaatcgagaactgaaagatttgtcatttgtctctcaaatatctgtggagagaagagaaattggaataaagaagacagtgttgtgagagagagagagagagagagagatgagttcgtctctacctctgaggctacttcttcctcttacaacttctctgatttctcctcctcctcctcctccagattctttccatgctccttcgtcgttcagatcgaaaaaccctaatttcaaacgccgattgtcttcttcttcctgttgttcttcccagtcgcagcttttctctgggagatgcagatcctattcgcggtgtgttaccatgtgcttaccagaacacatgagaaatcaagagaacacagaaatcttgacagataaagatgaccacaggctatcgttgaaggatctggttcagttgcagtgtcagagctaaaacccgctgctgatgtagattacatacaagagctattggcgatacagcagcaaggtcctagatcaattggcttctttgggacaagaaatatgggtttcatgcatcaagaactgattgagatacttagctacgccatggttataaccaaaaatcatatatacacatcaggtgcatctggaactaatgctgcagtcatcagaggtgcattgagagcagagagaccagagctgcttacagtaattctaccccaaagtttgaaaaaacaacctcctgagagccaagaactattgtctaaagtacaaaacgtggtagaaaagccacataatgaccatttgccattgttagaagccagcaggttgtgtaatatggacatcatatcacaagttcaacaagtgatctgcttcgcgtttcatgacagtaagcttcttatggagacatgtcaagaagccaaaaatctgcgcaagattgtcactctcttctacctcgattggttcacattcactctttattttcttctcgttacaaaacagagaagataatcctccttgtaaattatgaatcttgattaaacaaacacacacaaccacaattatattcttttgtct

SEQ ID NO: 108118 - protein, 149 aa, Arabidopsis thaliana
  peptide (1)..(149): Ceres Seq. ID no. 13653233
MGFMHQELIEILSYAMVITKNHIYTSGASGTNAAVIRGALRAERPELLTVILPQSLKKQPPESQELLSKVQNVVEKPHNDHLPLLEASRLCNMDIISQVQQVICFAFHDSKLLMETCQEAKNLRKIVTLFYLDWFTFTLYFLLVTKQRR

SEQ ID NO: 108119 - protein, 146 aa, Arabidopsis thaliana
  peptide (1)..(146): Ceres Seq. ID no. 13653234
MHQELIEILSYAMVITKNHIYTSGASGTNAAVIRGALRAERPELLTVILPQSLKKQPPESQELLSKVQNVVEKPHNDHLPLLEASRLCNMDIISQVQQVICFAFHDSKLLMETCQEAKNLRKIVTLFYLDWFTFTLYFLLVTKQRR

SEQ ID NO: 108120 - protein, 134 aa, Arabidopsis thaliana
  peptide (1)..(134): Ceres Seq. ID no. 13653235
MVITKNHIYTSGASGTNAAVIRGALRAERPELLTVILPQSLKKQPPESQELLSKVQNVVEKPHNDHLPLLEASRLCNMDIISQVQQVICFAFHDSKLLMETCQEAKNLRKIVTLFYLDWFTFTLYFLLVTKQRR

SEQ ID NO: 108121 - DNA, 1220 bp, Arabidopsis thaliana
  misc_feature (1)..(1220): Ceres Seq. ID no. 13653252
  misc_feature (1)..(1220): Ortholog of  Ceres SEQ ID NO 15225703 as cited in SEQ ID NO 59527
  misc_feature (1)..(1220): Ortholog of  Ceres SEQ ID NO 12615972 as cited in SEQ ID NO 62455
  misc_feature (1)..(1220): Ortholog of  Ceres SEQ ID NO 13596229 as cited in SEQ ID NO 68800
  misc_feature (1)..(1220): Ortholog of  Ceres SEQ ID NO 15179393 as cited in SEQ ID NO 0
cctgaatttcgtatttgatccgtttaatccaagtttcgattttatataacaaccacatagacagagagagagagagagagaaacagagtaatggcgaacagagatgtggagagagtagggaagaaaaacagaggagctaataacaattatttctacgaggagtcttctggtgaaactcattggacttcatggctgattccggcgattgtagtggcaaatctcgctgtctttatcgctgttatgttcgttaatgattgtcctaagaaaatcaccggacctaacaaagagtgtgttgctagattcctcggaagattctcgtttcaaccacttaaagagaatcctctctttggtccttcttcttcaacattggagaaaatgggagcattggaatggaggaaagtagtacatgaacatcaaggatggagacttctctcttgtatgtggcttcacgctggtatcattcatcttcttacaaacatgttgagtttgatcttcattggtatccgccttgagcagcaatttggcttcataagagtcgggttgatatacttaatatcgggtctcggtggaagcatactttcgtcgcttttccttcaagaaagtatctctgttggtgcttcgggtgctctctttggacttcttggagcaatgttatctgaacttcttaccaattggactatctatgccaacaaggcggctgctctgatcacacttctgttcatcatcgcaatcaacttagcattaggcatgcttcctcgggttgacaactttgcacacattggagggtttttaaccggattctgcctcgggtttgtcctccttgtccgacctcagtacggttgggaagcttcgcgcaccaacacttcgcgaaccaaacgaaagtatagcatgtaccagtacgtgctgtttgtagtttcagtggtgctacttgtggttgggctaacggttgcattagtgatgcttttcaaaggagagaatgggaacaaacattgcaaatggtgtcattaccttagctgtttcccaacttctaaatggacctgctaatcatcatcatcatcatcataatcatatagtaaaagcttttatatgtgttcttgttaacatttaatctctttgatctctctagcctttgattatttatatatgtgtacattacaaaattcgtcttgtgtaaaaggggatagaaataaaagagtgtattatttttacatttgaacacc

SEQ ID NO: 108122 - protein, 317 aa, Arabidopsis thaliana; identical to SEQ ID NO: 22106
  peptide (1)..(317): Ceres Seq. ID no. 13653253

SEQ ID NO: 108123 - protein, 267 aa, Arabidopsis thaliana; identical to SEQ ID NO: 22107
  peptide (1)..(267): Ceres Seq. ID no. 13653254

SEQ ID NO: 108124 - protein, 222 aa, Arabidopsis thaliana; identical to SEQ ID NO: 22108
  peptide (1)..(222): Ceres Seq. ID no. 13653255

SEQ ID NO: 108125 - DNA, 1880 bp, Arabidopsis thaliana
  misc_feature (1)..(1880): Ceres Seq. ID no. 13653256
  misc_feature (1)..(1880): Ortholog of  Ceres SEQ ID NO 14307424 as cited in SEQ ID NO 54228
  misc_feature (1)..(1880): Ortholog of  Ceres SEQ ID NO 13664279 as cited in SEQ ID NO 61603
  misc_feature (1)..(1880): Ortholog of  Ceres SEQ ID NO 13584254 as cited in SEQ ID NO 63465
gagatatcttcatctgcttcaaatacgccaatttcacggcagattgcttccgctgtgctcttgttgtctccggtgataaccatgacccgaatacctgctgttctgcagtctgcaatggctttacgcacctctttccttggaggatcccttaaaccaacaaatccaacaaatactagattggactcaattgatgaataattggatgggttgagaagttgctgatgagcaggatggtcttcactgccatcataagtggcaaaatctgatggaacatctgagtatgcaaatccgagacatcttaatgcactcaaggacatatcatgtaggctttgtaaaataagatcccttgagtattggtcaagctctcgagtggaaccatcaagtagctgaatatgggtactcctttccaatacattttctacggcacccttgaccagtagcagtttctttcctgagctggaatccaccataactcccattgatttccggtcacggtcaaactcaagggtggcaatccgttgttctagttcactccatagccgacaacaacgtaagacattgccatcggatgaagcttcattcaacccttcgggaaatcccattttctcaaccaaaaccttcaaagctgcctcagtaggcatgcccctagacacaaattgctgatcagatttctcaacattagcatcgttgcaaatggcagcaatttttgcaatcatctgaagatttgcatccatccgacccgttggccaatcttcaatctttccatctcgagaaccgatgtcgttcttcgtcaacgtcggtgaagaaagcataaacacgtcaaaagacaaaagcacctctgtcttcttgctttcttcgcccttttacttcaacccacgaagatcaattcaactaaaccaatctcaaaaccatcatgaggacaagttttagacttctcttcttcgctttccttctacttgtctcaccttttctcaaagttgctttgtgccaatcggattcggaagattctggcttcgaagtttctgatgttggtgaagaagagagtgatgcagaggaagtttttggtttggaacttacctcagctcctggaattgaaaccctttgcgttttccccaagaacagtgcaaaaataataaaagctggagttgagactgagctgcttgttggaatgaaaaatgatggtcaatccaatgtagatattgttgctgttaaaggcagtttacatcttccttttgatcaaaatgctgttcagaatctcactgctctgagtttcagcaacgcgtctgtgccaacttccgctcaagctaccttgccatatgcttttgctgtcagcaagttcctgcaggcgggtgcttttgattttgttggcaccatcatctatgagatagatggtaagccataccaaagcatcttttataatggaactattgaagttgttgaagatggtcctctcttcagaatggagtcagtcttccttagtggtcttttaatctttgttatcgcttttctcgccatctatatccaaaatgttttgaagcatatgaccaagaaaacaaagagagcaccaaaagttgaagttggaaccgcaactaaagatgcttcgcatgatgaatggcttgagggtacttcgtacactcaatcttcgagtaagtcaaagaagaagaagtagatctcacacgctttgttagggggcttgagataagaaaccgaaaacacacgaacgatagtaacgttgcagttgttggtagagataacttcacagaatctgtaatgctttctttactctctctagctatagatgttgcaaggaaacaattttctttaacttttgtaatttgtcaagattattttcttttgtttaaaatgataattctctttcg

SEQ ID NO: 108126 - protein, 251 aa, Arabidopsis thaliana
  peptide (1)..(251): Ceres Seq. ID no. 13653257
MRTSFRLLFFAFLLLVSPFLKVALCQSDSEDSGFEVSDVGEEESDAEEVFGLELTSAPGIETLCVFPKNSAKIIKAGVETELLVGMKNDGQSNVDIVAVKGSLHLPFDQNAVQNLTALSFSNASVPTSAQATLPYAFAVSKFLQAGAFDFVGTIIYEIDGKPYQSIFYNGTIEVVEDGPLFRMESVFLSGLLIFVIAFLAIYIQNVLKHMTKKTKRAPKVEVGTATKDASHDEWLEGTSYTQSSSKSKKKK

SEQ ID NO: 108127 - protein, 166 aa, Arabidopsis thaliana
  peptide (1)..(166): Ceres Seq. ID no. 13653258
MKNDGQSNVDIVAVKGSLHLPFDQNAVQNLTALSFSNASVPTSAQATLPYAFAVSKFLQAGAFDFVGTIIYEIDGKPYQSIFYNGTIEVVEDGPLFRMESVFLSGLLIFVIAFLAIYIQNVLKHMTKKTKRAPKVEVGTATKDASHDEWLEGTSYTQSSSKSKKKK

SEQ ID NO: 108128 - DNA, 3064 bp, Arabidopsis thaliana
  misc_feature (1)..(3064): Ceres Seq. ID no. 13653281
  misc_feature (1)..(3064): Ortholog of  Ceres SEQ ID NO 13597407 as cited in SEQ ID NO 64106
  misc_feature (1)..(3064): Ortholog of  Ceres SEQ ID NO 15180690 as cited in SEQ ID NO 0
ctggaatttgagtaaaagcaagaaaaaaagtcaaccgttgcaacaaactcttaaaaagaagcaaagtagtagcagaagaagaagaagaagaagaagaaaagaaaatggcaggagggtcgtttggtccgaccggtgtggctaaggagagagcagaacaataccaagggaaagtcactagttatgttataatcgcttgccttgttgcagctattggtggatccatctttggatatgacattggaatctcaggaggagttacatcgatggatgagtttcttgaggagtttttccacacggtttatgagaagaagaagcaagctcatgaaagtaattactgcaaatatgataatcaaggcttagctctgatgaatcccctaatgattttggtaaaaatcattaagttaaggtggatacacatcttgtcatatgatcaaatggtttcgcgaaaaatcaataatcagacaacaagatgtgcgaactcgatattttacacgactctctttaccaattctgccccgaattacacttaaaacgactcaacagcttaacgttggcttgccacgcattacttgactgtaaaactctcactcttaccgaacttggccgtaacctgccaaccaaagcgagaacaaaacataacatcaaacgaatcgaccgattgttaggtaatcgtcacctccacaaagagcgactcgctgtataccgttggcatgctagctttatctgttcgggcaatacgatgcccattgtacttgttgactggtctgatattcgtgagcaaaaacgacttatggtattgcgagcttcagtcgcactacacggtcgttctgttactctttatgagaaagcgttcccgctttcagagcaatgttcaaagaaagctcatgaccaatttctagccgaccttgcgagcattctaccgagtaacaccacaccgctcattgtcagtgatgctggctttaaagtgccatggtataaatccgttgagaagctgggttggtactggttaagtcgagtaagaggaaaagtacaatatgcagacctaggagcggaaaactggaaacctatcagcaacttacatgatatgtcatctagtcactcaaagactttaggctataagaggctgactaaaagcaatccaatctcatgccaaattctattgtataaatctcgctctaaaggccgaaaaaatcagcgctcgacacggactcattgtcaccacccgtcacctaaaatctactcagcgtcggcaaaggagccatgggttctagcaactaacttacctgttgaaattcgaacacccaaacaacttgttaatatctattcgaagcgaatgcagattgaagaaaccttccgagacttgaaaagtcctgcctacggactaggcctacgccatagccgaacgagcagctcagagcgttttgatatcatgctgctaatcgccctgatgcttcaactaacatgttggcttgcgggcgttcatgctcagaaacaaggttgggacaagcacttccaggctaacacagtcagaaatcgaaacgtactctcaacagttcgcttaggcatggaagttttgcggcattctggctacacaataacaagggaagacttactcgtggctgcaaccctactagctcaaaatttattcacacatggttacgctttggggaaattatgaggggatctctcagggcttagctgctttcacttcttcactctacttagctggtttggtttcgactctcgtggcttcacccatcactaggaactacggtaggcgtgcgagtattgtttgtggtggaatcagctttcttattggatctggtttgaatgctggagctgtgaacttagctatgcttcttgccggacggatcatgcttggtgttggtattggatttggaaatcaggcggttcctttgtatttatcagaagtggcaccaactcatctacgaggtggtttaaacatgatgtttcagctagctacaactatcgggatctttacagcgaacatggttaattacggtactcaacagcttaagccttggggatggagactctctcttggtttagctgcttttccagctctgcttatgacgcttggcgggtatttcttacccgagacaccaaacagtttggtcgaaagaggattaacagagagaggtcgacgagtcttagtgaagctaagaggaacagaaaacgtcaacgccgagcttcaagacatggtagatgcgagtgagcttgcgaattccatcaaacatccattcagaaacatcttgcagaaacgacacaggcctcagctagttatggctatttgcatgccaatgtttcagatactcacagggataaactccattctcttctacgcacctgttctgttccagacaatggggtttggaggaaacgcatctctctattcatcagctttaacaggagctgttcttgtcctatcaacatttatttccataggattagtagacagattgggacgaagagctcttctcataactggaggaatacaaatgataatctgtcaagtcatagtagcagtgatcttaggagtgaaatttggagacaaccaagagctatcaaaagggtactcagtgatcgtagtcatcttcatctgcctctttgttgtagcgttcggatggtcatggggtcctctaggttggaccatacctagcgaaatctttccgttagagactcgttcagcggggcagagtatcacagtagctgtaaatctcctcttcactttcatcatagctcaagctttccttggtctcctctgtgcattcaagtttggaatcttcctcttctttgctggttgggtgacagtaatgactatctttgtgtatttcctgttgcctgaaaccaaaggagttccaatagaagagatgacactcttatggagtaaacattggttctggaaaaaagtattacctgatgcaacaaatcttgaagatgagagcaagaatgtatctgtttaaagagaatataaactgattcaagaaacttatgtttgtattactataaggttttttattgcataaggagagatttgaatccc

SEQ ID NO: 108129 - protein, 443 aa, Arabidopsis thaliana
  peptide (1)..(443): Ceres Seq. ID no. 13653282
MVTLWGNYEGISQGLAAFTSSLYLAGLVSTLVASPITRNYGRRASIVCGGISFLIGSGLNAGAVNLAMLLAGRIMLGVGIGFGNQAVPLYLSEVAPTHLRGGLNMMFQLATTIGIFTANMVNYGTQQLKPWGWRLSLGLAAFPALLMTLGGYFLPETPNSLVERGLTERGRRVLVKLRGTENVNAELQDMVDASELANSIKHPFRNILQKRHRPQLVMAICMPMFQILTGINSILFYAPVLFQTMGFGGNASLYSSALTGAVLVLSTFISIGLVDRLGRRALLITGGIQMIICQVIVAVILGVKFGDNQELSKGYSVIVVIFICLFVVAFGWSWGPLGWTIPSEIFPLETRSAGQSITVAVNLLFTFIIAQAFLGLLCAFKFGIFLFFAGWVTVMTIFVYFLLPETKGVPIEEMTLLWSKHWFWKKVLPDATNLEDESKNVSV

SEQ ID NO: 108130 - protein, 402 aa, Arabidopsis thaliana
  peptide (1)..(402): Ceres Seq. ID no. 13653283
MCELDILHDSLYQFCPELHLKRLNSLTLACHALLDCKTLTLTELGRNLPTKARTKHNIKRIDRLLGNRHLHKERLAVYRWHASFICSGNTMPIVLVDWSDIREQKRLMVLRASVALHGRSVTLYEKAFPLSEQCSKKAHDQFLADLASILPSNTTPLIVSDAGFKVPWYKSVEKLGWYWLSRVRGKVQYADLGAENWKPISNLHDMSSSHSKTLGYKRLTKSNPISCQILLYKSRSKGRKNQRSTRTHCHHPSPKIYSASAKEPWVLATNLPVEIRTPKQLVNIYSKRMQIEETFRDLKSPAYGLGLRHSRTSSSERFDIMLLIALMLQLTCWLAGVHAQKQGWDKHFQANTVRNRNVLSTVRLGMEVLRHSGYTITREDLLVAATLLAQNLFTHGYALGKL

SEQ ID NO: 108131 - protein, 376 aa, Arabidopsis thaliana; identical to SEQ ID NO: 48003
  peptide (1)..(376): Ceres Seq. ID no. 13653284

SEQ ID NO: 108132 - DNA, 1695 bp, Arabidopsis thaliana
  misc_feature (1)..(1695): Ceres Seq. ID no. 13653297
  misc_feature (1)..(1695): Ortholog of  Ceres SEQ ID NO 14304034 as cited in SEQ ID NO 53878
  misc_feature (1)..(1695): Ortholog of  Ceres SEQ ID NO 15171520 as cited in SEQ ID NO 60477
ttggttgaggaatggcttcttcagtctctcttcagttcctgaccaacacctttatctccaaacctcagggtttctgcaacggaattgtgtcagcaccaagacccagaagcaatttattaagagacagacaaaatggtgtacgacccatcaaagttgcgtctattgagacacaacctttccctctgtttcaatctcctgcttccgaagaatcttcctcgtccgagctggagacagcagatccggatttctacaaaattggctatgttcgaagtgtgagagcttatggagttgagtttaaagaaggtccagatggttttggtgtctatgcttctaaggatatcgaacctcgccgtcgagctagagtgattatggagattcctcttgaactgatgataaccattagacagaagcacccttggatgtttttccctgatattgtaccaattggtcatcctattttcgatatcattaactcgactgatcctgagattgattgggatatcagattagcgtgtcttctgttattctcttttgatcgagatgatcacttctggcggctctatggcgatttcctgccggctgctgatgagtgcagcagcttgcttttagctacagaggaagaccttgcggagcttcaagatcctgatcttgtttcaactatcagacaacaacagaaacgaatcctagatttttgggaaaagaattggcattcaggtgttcctctcaaaatcaaaaggcttgccgaggatccagaaagattcatatgggcggttagtatggcacagacacgatgcatcagtatgcaaactagggtcggtgctttggttcaggaattaaatatgatgattccttatgctgacatgctaaaccactcatttgaaccaaactgtttcctacattggcgtcctaaagatcgcatgctggaggttatgtcaaatgctggtcaagacattaagaaaggcgaagagatgacgattaattacatgccaggccagaaaaacaacatgcttatggaaagatacggcttctcaactcctgtgaatccgtgggatgctataaagttctctggagattctcgcatccatttaaattcctttttatcggtcttcaatatttatggtcttcctgaagaatattaccatgacagcgagttatcgaggggcgatacttttgttgatggagcagttatcgctgcagcaagaacattacctacttggtcagacatagatcttcctccaataccgagtgcggaaagaaaagcagttaaagaattgcaagatgaatgtcgaaagatgcttgcggaatatcccacaacagcagagcaagaccagaagttgctagattcaatgtcagaagcaaggacaacatttgcaacagcggttaagtatagaatgcacagaaagatgttcatcggaaaaattatcaaggcacttgacatctatcaagaacggttactctattgattcaagcaaaaaataattatgagctgagtgagattcatacttggtgctcactcccttgagctacttagaaactgcaccatgtaattgaaaggttcctgtttttttttttgtttagtgtaaggttatgtatttgtatggaacagttagactaagtgtgttagtttgttttaatcgcaatcacaaacaaatcataacctcttcttttcttggctgctttaatgagtttgattag

SEQ ID NO: 108133 - protein, 483 aa, Arabidopsis thaliana
  peptide (1)..(483): Ceres Seq. ID no. 13653298
MASSVSLQFLTNTFISKPQGFCNGIVSAPRPRSNLLRDRQNGVRPIKVASIETQPFPLFQSPASEESSSSELETADPDFYKIGYVRSVRAYGVEFKEGPDGFGVYASKDIEPRRRARVIMEIPLELMITIRQKHPWMFFPDIVPIGHPIFDIINSTDPEIDWDIRLACLLLFSFDRDDHFWRLYGDFLPAADECSSLLLATEEDLAELQDPDLVSTIRQQQKRILDFWEKNWHSGVPLKIKRLAEDPERFIWAVSMAQTRCISMQTRVGALVQELNMMIPYADMLNHSFEPNCFLHWRPKDRMLEVMSNAGQDIKKGEEMTINYMPGQKNNMLMERYGFSTPVNPWDAIKFSGDSRIHLNSFLSVFNIYGLPEEYYHDSELSRGDTFVDGAVIAAARTLPTWSDIDLPPIPSAERKAVKELQDECRKMLAEYPTTAEQDQKLLDSMSEARTTFATAVKYRMHRKMFIGKIIKALDIYQERLLY

SEQ ID NO: 108134 - protein, 364 aa, Arabidopsis thaliana
  peptide (1)..(364): Ceres Seq. ID no. 13653299
MEIPLELMITIRQKHPWMFFPDIVPIGHPIFDIINSTDPEIDWDIRLACLLLFSFDRDDHFWRLYGDFLPAADECSSLLLATEEDLAELQDPDLVSTIRQQQKRILDFWEKNWHSGVPLKIKRLAEDPERFIWAVSMAQTRCISMQTRVGALVQELNMMIPYADMLNHSFEPNCFLHWRPKDRMLEVMSNAGQDIKKGEEMTINYMPGQKNNMLMERYGFSTPVNPWDAIKFSGDSRIHLNSFLSVFNIYGLPEEYYHDSELSRGDTFVDGAVIAAARTLPTWSDIDLPPIPSAERKAVKELQDECRKMLAEYPTTAEQDQKLLDSMSEARTTFATAVKYRMHRKMFIGKIIKALDIYQERLLY

SEQ ID NO: 108135 - protein, 357 aa, Arabidopsis thaliana
  peptide (1)..(357): Ceres Seq. ID no. 13653300
MITIRQKHPWMFFPDIVPIGHPIFDIINSTDPEIDWDIRLACLLLFSFDRDDHFWRLYGDFLPAADECSSLLLATEEDLAELQDPDLVSTIRQQQKRILDFWEKNWHSGVPLKIKRLAEDPERFIWAVSMAQTRCISMQTRVGALVQELNMMIPYADMLNHSFEPNCFLHWRPKDRMLEVMSNAGQDIKKGEEMTINYMPGQKNNMLMERYGFSTPVNPWDAIKFSGDSRIHLNSFLSVFNIYGLPEEYYHDSELSRGDTFVDGAVIAAARTLPTWSDIDLPPIPSAERKAVKELQDECRKMLAEYPTTAEQDQKLLDSMSEARTTFATAVKYRMHRKMFIGKIIKALDIYQERLLY

SEQ ID NO: 108136 - DNA, 1027 bp, Arabidopsis thaliana
  misc_feature (1)..(1027): Ceres Seq. ID no. 13653301
  misc_feature (1)..(1027): Ortholog of  Ceres SEQ ID NO 14316060 as cited in SEQ ID NO 52465
  misc_feature (1)..(1027): Ortholog of  Ceres SEQ ID NO 13664032 as cited in SEQ ID NO 67527
ataccccctcttttcacaggctctcttcatttcagttgcatgcgaaaccattctctgcaatccctccattgtcatgtctgtactcttttcatgacgaacagttaatgaaatagcttttcaatcttataaaccgcgcatgcagacgtcatcgaagccattatgcactaaaacttccatttttcttatttttgttaggattagcagcgaattttctgatggcagagggcagtatgcgtcctccagaattcaaccagcctaacaaaaccagtaatggtggtgaggaggagtgcacggtgagggagcaagacaggttcatgcctattgccaacgtgatacggatcatgcggaggatcttacctgctcacgccaggatctcagatgactccaaggagacgatccaagagtgtgtttcggagtacatcagcttcataacaggggaggctaatgagcggtgccagcgggaacagcgcaagaccatcactgctgaggacgtcttgtgggcaatgagcaagctcggttttgatgactacatcgaacccctcacgttgtacctccaccgctacagagagttggaaggtgaaagaggggttagctgcagtgctgggtccgttagtatgaccaacggcttggtggtcaagaggcctaatgggaccatgaccgagtatggagcctacgggcctgtgccagggattcacatggcgcagtaccattatcgtcatcagaacgggtttgttttcagtggtaacgaacctaattctaagatgagtggttcatcttcaggagcaagtggcgccagagttgaagtatttccgactcaacaacataagtactgagaacaatggctaataacatagacagctgacagagtcataactgttagtaggtgcaagctgtagcttatgaattcaagtttaagcgaaaacaatgctgctttttctttgtttattatctatctagttgaaagaacattgtgtttttcatctgatctgtcttgtggtaaagtatgtcaataaagcattagttttgc

SEQ ID NO: 108137 - protein, 205 aa, Arabidopsis thaliana
  peptide (1)..(205): Ceres Seq. ID no. 13653302
MAEGSMRPPEFNQPNKTSNGGEEECTVREQDRFMPIANVIRIMRRILPAHARISDDSKETIQECVSEYISFITGEANERCQREQRKTITAEDVLWAMSKLGFDDYIEPLTLYLHRYRELEGERGVSCSAGSVSMTNGLVVKRPNGTMTEYGAYGPVPGIHMAQYHYRHQNGFVFSGNEPNSKMSGSSSGASGARVEVFPTQQHKY

SEQ ID NO: 108138 - protein, 200 aa, Arabidopsis thaliana
  peptide (1)..(200): Ceres Seq. ID no. 13653303
MRPPEFNQPNKTSNGGEEECTVREQDRFMPIANVIRIMRRILPAHARISDDSKETIQECVSEYISFITGEANERCQREQRKTITAEDVLWAMSKLGFDDYIEPLTLYLHRYRELEGERGVSCSAGSVSMTNGLVVKRPNGTMTEYGAYGPVPGIHMAQYHYRHQNGFVFSGNEPNSKMSGSSSGASGARVEVFPTQQHKY

SEQ ID NO: 108139 - protein, 172 aa, Arabidopsis thaliana
  peptide (1)..(172): Ceres Seq. ID no. 13653304
MPIANVIRIMRRILPAHARISDDSKETIQECVSEYISFITGEANERCQREQRKTITAEDVLWAMSKLGFDDYIEPLTLYLHRYRELEGERGVSCSAGSVSMTNGLVVKRPNGTMTEYGAYGPVPGIHMAQYHYRHQNGFVFSGNEPNSKMSGSSSGASGARVEVFPTQQHKY

SEQ ID NO: 108140 - DNA, 3642 bp, Arabidopsis thaliana
  misc_feature (1)..(3642): Ceres Seq. ID no. 13653313
  misc_feature (1)..(3642): Ortholog of  Ceres SEQ ID NO 14313620 as cited in SEQ ID NO 54969
gatttacacatccttcttcttccagttccatgtcgcatacgtacacagattgacagcgaagctagttagctcagattttggatctcgaatttcagttaattcgatccggttatggacattctttttgctcagatccaggcggacctccgttcaaatgacgcgcttcgccagtcatcggcgcttcttcaggcgctgcagcaatccgccgccggaagagatatctctgtgatcgctaagtctgctgtggaggagattgttgcttctccggcttcagctgtttgtaagaagctggcattcgatctcatccgatctacccgcctcactccggatctttgggacaccgtttgctcaggtgtcaaaacggatcttcattttccggacccggatgttaccgccgctgccgtctccatccttgcggctctccctgccttctcgcttcctaaactcatctctgattgcagctctgagattgcttcctgcttcgattctccatctgacaaccttcgtttttccatcaccgagacacttggctgcatcctcgcgcgtgatgatctcgttactttgtgcgagaacaatgtgggtctcctcgacaaggtctccaactggtgggctcggatcggccagaacatgctcgacaaatccgacgccgtctccaaggttgcctttgagtccgtcggcagactcttccaggagttcgactccaagcggatgagccgtcttgctggcgataagctcgttgacagcgagaactccctcgccatcaggtccaagtgggtctcttccatggttgacattgtatggagaaagaggagcgctttgatggctaggtctttagtccttcctgtcgaaaccttcagagccactgttttccctcttgtctttgctgtcaaagctgttgcttccggtagtgtcgaagtgattagacagctttccaaggcttcctctgctgctgctgcagctaatgccaccgttgtggactccaacgccgagaagctggttggcgtctcagatttggttacccatttggcgccattcttggcttcctctttggatccagctttgatttttgaagtgggaattaacatgctctacctggcagatgttgccggaggcaagccagagtgggcttcacagtccattattgcaattttaacactctgggaccgccaagaattttcctctgctagagagagtatagtcagggccgttgttacgaacctgcacttgcttgatctgcatatgcaggtttcgttgtttagaagactgctgcttatggtgagaaacttgagagcagaatcggacaggatgcacgcattagcctgtatctgtcggacagctctctgtgttcacctttttgccagagaaagtgcccgaagaggtcagaagcctctgcctgggacagatattatttctctctttgaagatgcaaggattaaagatgatctcaatagtgttaccagtaagagcttatttcgggaagagctggtggcaatgcttgtggaaagctgcttccagttgtctctacctttgcctgaacaaaaaaactcgggtatggagagcagagtgattggtgcgttagcatatggtactggttatggtgctctgaactggacagaaccagcccttgaggttgtggaagtttgtaggccttgtgtcaaatgggattgtgatggcaggacgtacgctgtagattgctatttgaaattgcttgttaggctgtgccatatctatgatacccgtggaggagtgaagaggctgaaagatggtgcttcccaggatcaaatattaaatgagacacgattgcagaacttgcaacgtgagcttgttaaggatctccaagaggtaaataccccaagaatcctcgggcgtcttatatggacaatcgcagaacatattgatctagaaggtctagatccacttttagctgatgaccccgatgatccattgaatattatcatagcaaacatacataaggttctcttcaacttggatgccgctgctactacatcgaataggctacaagatgttcaggcagtcttattatgcgcccagaggatgggatcgcgtcatgcaagagctggccagttattaaccaaagagcttgaagagtataggaaccatgctgctgcagatacagttagcaaacatcaaacccgtttaatattgcagaggatcaaatatgtttcaaatcttcctgaaagaaagtgggctggagttagtgagacaagaggagattacccgtttagccaccataagcttactgttcagttttacgaaccatcagctgctcaagacaggaaattagaaggtctaattcacaaggccattctcgagctttggaggccaaagcccactgaattaactctcttccttacaaaaggggtcgactcaacttctatcaaggttcctcccacagcatatcctttgaccggaagcagtgatccttgctatatagaagcttaccatttagcagatacaaatgatggaagggtcactttgcacttgaagattattaatttgacagaacttgaactgaatcgtgtggatatacgggttggattatctggtgccctatacttcatggatggctctcctcaagcagtgcggcagttgcgtaatcttgtctcacaggatcctgtacaatgcagtgtcaccgttggtgtgtcccaatttgaaagatgtggtttctgggttcaagtcctctactatccattccgtggtgctaggggagaatatgacggtgactacatagaagaggatccacagatcatgaagcagaagagaggttcaaaagcagaactcggagagcctgtgatcttaagatgtcagccttacaagatcccactgactgagcttcttctaccgcacaaaatctcaccagtcgagttctttcgtttgtggcctagcttgccagctgttgcagagtacactggcacatatatgtatgaaggaagcggcttcatggcgaccgccgcacaacagtatggggcttcaccatttttaagcggactcaaatcattatcctcgaagccattccacagagtctgttcccacattatacgcacagttgctggctttcagctttgttacgctgcaaaaacgtggcatggaggttttgtgggtatgatgatctttggcgctagtgaagtgagcaggaacatggatctgggtgacgagactaccaccatgatgtgcaagtttgtggttagagcatcagaagcatcaatcacaaagcaaatagagtcggatattcagggatggtgtgatgatctaactgacgggggcgttgagtacatgccagaggacgaagtgaaggcaaccgcggccgagaagctgaagatctctatggagaggatagctttgttgaaggcagctcagccgaagaagacttcaaagatagaggaggaatcagaaaacgaagaagaagaagaaggagaagaagaagatgatgatgaagaagtaaaagagaaaaaggagaaagaagagggaaaggacaaggaagagaagaagaaaaaagagaaggaaaaaggaacattttctaagctgacagcagaagaaacagagcacatggcgcttcaggcagcagtgctccaagaatggcacatcttgtgcaaagatagaaaatataccaaagttaactaa

SEQ ID NO: 108141 - protein, 1176 aa, Arabidopsis thaliana
  peptide (1)..(1176): Ceres Seq. ID no. 13653314
MDILFAQIQADLRSNDALRQSSALLQALQQSAAGRDISVIAKSAVEEIVASPASAVCKKLAFDLIRSTRLTPDLWDTVCSGVKTDLHFPDPDVTAAAVSILAALPAFSLPKLISDCSSEIASCFDSPSDNLRFSITETLGCILARDDLVTLCENNVGLLDKVSNWWARIGQNMLDKSDAVSKVAFESVGRLFQEFDSKRMSRLAGDKLVDSENSLAIRSKWVSSMVDIVWRKRSALMARSLVLPVETFRATVFPLVFAVKAVASGSVEVIRQLSKASSAAAAANATVVDSNAEKLVGVSDLVTHLAPFLASSLDPALIFEVGINMLYLADVAGGKPEWASQSIIAILTLWDRQEFSSARESIVRAVVTNLHLLDLHMQVSLFRRLLLMVRNLRAESDRMHALACICRTALCVHLFARESARRGQKPLPGTDIISLFEDARIKDDLNSVTSKSLFREELVAMLVESCFQLSLPLPEQKNSGMESRVIGALAYGTGYGALNWTEPALEVVEVCRPCVKWDCDGRTYAVDCYLKLLVRLCHIYDTRGGVKRLKDGASQDQILNETRLQNLQRELVKDLQEVNTPRILGRLIWTIAEHIDLEGLDPLLADDPDDPLNIIIANIHKVLFNLDAAATTSNRLQDVQAVLLCAQRMGSRHARAGQLLTKELEEYRNHAAADTVSKHQTRLILQRIKYVSNLPERKWAGVSETRGDYPFSHHKLTVQFYEPSAAQDRKLEGLIHKAILELWRPKPTELTLFLTKGVDSTSIKVPPTAYPLTGSSDPCYIEAYHLADTNDGRVTLHLKIINLTELELNRVDIRVGLSGALYFMDGSPQAVRQLRNLVSQDPVQCSVTVGVSQFERCGFWVQVLYYPFRGARGEYDGDYIEEDPQIMKQKRGSKAELGEPVILRCQPYKIPLTELLLPHKISPVEFFRLWPSLPAVAEYTGTYMYEGSGFMATAAQQYGASPFLSGLKSLSSKPFHRVCSHIIRTVAGFQLCYAAKTWHGGFVGMMIFGASEVSRNMDLGDETTTMMCKFVVRASEASITKQIESDIQGWCDDLTDGGVEYMPEDEVKATAAEKLKISMERIALLKAAQPKKTSKIEEESENEEEEEGEEEDDDEEVKEKKEKEEGKDKEEKKKKEKEKGTFSKLTAEETEHMALQAAVLQEWHILCKDRKYTKVN

SEQ ID NO: 108142 - protein, 1004 aa, Arabidopsis thaliana
  peptide (1)..(1004): Ceres Seq. ID no. 13653315
MLDKSDAVSKVAFESVGRLFQEFDSKRMSRLAGDKLVDSENSLAIRSKWVSSMVDIVWRKRSALMARSLVLPVETFRATVFPLVFAVKAVASGSVEVIRQLSKASSAAAAANATVVDSNAEKLVGVSDLVTHLAPFLASSLDPALIFEVGINMLYLADVAGGKPEWASQSIIAILTLWDRQEFSSARESIVRAVVTNLHLLDLHMQVSLFRRLLLMVRNLRAESDRMHALACICRTALCVHLFARESARRGQKPLPGTDIISLFEDARIKDDLNSVTSKSLFREELVAMLVESCFQLSLPLPEQKNSGMESRVIGALAYGTGYGALNWTEPALEVVEVCRPCVKWDCDGRTYAVDCYLKLLVRLCHIYDTRGGVKRLKDGASQDQILNETRLQNLQRELVKDLQEVNTPRILGRLIWTIAEHIDLEGLDPLLADDPDDPLNIIIANIHKVLFNLDAAATTSNRLQDVQAVLLCAQRMGSRHARAGQLLTKELEEYRNHAAADTVSKHQTRLILQRIKYVSNLPERKWAGVSETRGDYPFSHHKLTVQFYEPSAAQDRKLEGLIHKAILELWRPKPTELTLFLTKGVDSTSIKVPPTAYPLTGSSDPCYIEAYHLADTNDGRVTLHLKIINLTELELNRVDIRVGLSGALYFMDGSPQAVRQLRNLVSQDPVQCSVTVGVSQFERCGFWVQVLYYPFRGARGEYDGDYIEEDPQIMKQKRGSKAELGEPVILRCQPYKIPLTELLLPHKISPVEFFRLWPSLPAVAEYTGTYMYEGSGFMATAAQQYGASPFLSGLKSLSSKPFHRVCSHIIRTVAGFQLCYAAKTWHGGFVGMMIFGASEVSRNMDLGDETTTMMCKFVVRASEASITKQIESDIQGWCDDLTDGGVEYMPEDEVKATAAEKLKISMERIALLKAAQPKKTSKIEEESENEEEEEGEEEDDDEEVKEKKEKEEGKDKEEKKKKEKEKGTFSKLTAEETEHMALQAAVLQEWHILCKDRKYTKVN

SEQ ID NO: 108143 - protein, 977 aa, Arabidopsis thaliana
  peptide (1)..(977): Ceres Seq. ID no. 13653316
MSRLAGDKLVDSENSLAIRSKWVSSMVDIVWRKRSALMARSLVLPVETFRATVFPLVFAVKAVASGSVEVIRQLSKASSAAAAANATVVDSNAEKLVGVSDLVTHLAPFLASSLDPALIFEVGINMLYLADVAGGKPEWASQSIIAILTLWDRQEFSSARESIVRAVVTNLHLLDLHMQVSLFRRLLLMVRNLRAESDRMHALACICRTALCVHLFARESARRGQKPLPGTDIISLFEDARIKDDLNSVTSKSLFREELVAMLVESCFQLSLPLPEQKNSGMESRVIGALAYGTGYGALNWTEPALEVVEVCRPCVKWDCDGRTYAVDCYLKLLVRLCHIYDTRGGVKRLKDGASQDQILNETRLQNLQRELVKDLQEVNTPRILGRLIWTIAEHIDLEGLDPLLADDPDDPLNIIIANIHKVLFNLDAAATTSNRLQDVQAVLLCAQRMGSRHARAGQLLTKELEEYRNHAAADTVSKHQTRLILQRIKYVSNLPERKWAGVSETRGDYPFSHHKLTVQFYEPSAAQDRKLEGLIHKAILELWRPKPTELTLFLTKGVDSTSIKVPPTAYPLTGSSDPCYIEAYHLADTNDGRVTLHLKIINLTELELNRVDIRVGLSGALYFMDGSPQAVRQLRNLVSQDPVQCSVTVGVSQFERCGFWVQVLYYPFRGARGEYDGDYIEEDPQIMKQKRGSKAELGEPVILRCQPYKIPLTELLLPHKISPVEFFRLWPSLPAVAEYTGTYMYEGSGFMATAAQQYGASPFLSGLKSLSSKPFHRVCSHIIRTVAGFQLCYAAKTWHGGFVGMMIFGASEVSRNMDLGDETTTMMCKFVVRASEASITKQIESDIQGWCDDLTDGGVEYMPEDEVKATAAEKLKISMERIALLKAAQPKKTSKIEEESENEEEEEGEEEDDDEEVKEKKEKEEGKDKEEKKKKEKEKGTFSKLTAEETEHMALQAAVLQEWHILCKDRKYTKVN

SEQ ID NO: 108144 - DNA, 1780 bp, Arabidopsis thaliana
  misc_feature (1)..(1780): Ceres Seq. ID no. 13653325
  misc_feature (1)..(1780): Ortholog of  Ceres SEQ ID NO 13656435 as cited in SEQ ID NO 65853
ttggacaacaaatctttagaagagtcaacaaatttttacagtaatttttttgactctcttcttcttcttcttcttcttcttcttcttcttcttcttcttcttcttcttcatattttccctatgatttggatctctaaaatcttcaatccccatgttctaatttaaaaaatcacaacactctctttatcatataccctattataaaccaaactttgatcctcgaatatattttattaaaaagataatattcgtgtttctcatgttggagtcataataaagaaacctttgtgttttaatttaatcccctccaagaaacctgaagattctaagaagctgccattaaaactaataaaggaagagagtccaaagaagaagaagaagaagagaaaatgtcacgtcttgacgacataccttcaagcccaggcaaattcaagatggagaaatcttcctacttgcatcgtctcagattccaatcttctctcacaaagtttgcatttttctccttcttcctcctctgtctcatctctctactcttcctccgatctccaccgtccattaacccttcttcaccgtccgatccatctcgccgttcactccgaaccaacacctacggaggaccagcttgggaaaaacgtctcagatcctcagctcgaatccgaacctcaacaaacaacggaatcacagttttagtaaccggagcagctggtttcgtcggaacacacgtctccgccgcattaaaacgccgcggagacggcgtaatcggcctcgacaacttcaacgattactacgatccatctctgaaacgagcaagacgagctttactcgagagaagtgggatcttcatcgtagaaggagacataaacgacgtcgaattactccgtaagctattcaagatcgtctccttcacacacgttatgcatttagcagctcaagctggtgtacggtacgcaatggaaaaccctagctcgtacgttcatagcaacatcgccggattcgtcaatctcctcgagatctgcaaatctgtgaatccacaacctgctatagtctgggcttcgtctagctccgtctacggactcaacaccaaagttccgttctcggagaaagataaaacagatcaaccggcgagtttatacgccgccactaaaaaagccggcgaagagatcgcacatacctacaaccacatctatggattatctctaaccggattaagatttttcaccgtgtatggaccttggggaagaccagacatggcgtatttcttcttcactaaagatattctaaaaggcaaatcgatttcgatattcgaatcggcgaatcacggaacggtggctagggatttcacttacatagacgatatagtgaagggatgtttagcggcgctagatacggcggagaagagtacagggagtggagggaagaagagaggtccggcgcaattgagagtgtttaacctcggaaacacgtcgccggtgccggtttcagatctggtgaggatattggagagacaattgaaagtgaaggcgaagaagaatttgattaagatgccacgaaacggtgacgttccgtttactcatgctaatattagtttagctcaacgtgagcttggttataaaccgactacggatttgcaaaccggtttgaagaagtttgtcagatggtatttgagttattactccggcgacaaaaaagccgccgctagatgatctttttttctggttgatgatgatcttttgatttcttgttttttaattgatttgagtaatttttgggaatttgttgt

SEQ ID NO: 108145 - protein, 437 aa, Arabidopsis thaliana; identical to SEQ ID NO: 50096
  peptide (1)..(437): Ceres Seq. ID no. 13653326

SEQ ID NO: 108146 - protein, 422 aa, Arabidopsis thaliana; identical to SEQ ID NO: 50097
  peptide (1)..(422): Ceres Seq. ID no. 13653327

SEQ ID NO: 108147 - protein, 262 aa, Arabidopsis thaliana; identical to SEQ ID NO: 50098
  peptide (1)..(262): Ceres Seq. ID no. 13653328

SEQ ID NO: 108148 - DNA, 1646 bp, Arabidopsis thaliana
  misc_feature (1)..(1646): Ceres Seq. ID no. 13653340
  misc_feature (1)..(1646): Ortholog of  Ceres SEQ ID NO 14303790 as cited in SEQ ID NO 55525
attcttccacaatggattcttcatcttcagtaaaaatcgtctcgaaaagcttcgtgaaacccaaaaccttaccagaagaatcaaagcaaccatactatttatctccatgggactacgcaatgctctctgttcagtacatccaaaaaggtcttctctttcacaagccaccacttgactccattgacactcttcttgagaagctaaaagattctctggccgtcacactagtccatttctaccctctcgcgggtcgcctctcatcgttaacaacggaaaaaccgaaatcttactctgttttcgttgattgtaacgatagccctggcgcggggtttatctacgcgacctcagatttatgtataaaagatattgtgggtgctaagtatgtcccttcaattgttcaatctttctttgaccatcacaaagctgtgaatcatgatggacacaccatgagcctcttatctgtccaggtttgttatttttccatttttggaggacttttaggtttatagacttatataaatttaccatatattgaaactaaatcaagtacttcggtcaatttctagacatacatttgcattatcgaacaattagtattttcaacgaagaagacattcagtcacttgtgtttgtgtaggtgacagaattggtagatggaattttcataggactgtctatgaaccatgcgatgggagacggtactgcgttctggaagttctttaccgcatggtccgaaatcttccaaggacaagagagcaaccaaaacgatgacttgtgtcttaagaatccacccgtgttgaagcgttacatccctgaaggatacggtcctctattcagccttccatatagtcatccagatgaatttatcagaacctacgaatctccaattctcaaggagagaatgttctgtttctcatcagaaaccataagaatgcttaaaacaagggtcaaccaaatatgcggaacaacctccatctcatctttccaatcgctaaccgcggttatatggagatgcataacaagggcgaggagattacctctcgatcgaaaaacaagttgtagagttgctgctgacaacagaggaagaatgtatccaccgcttcacaaggattacttcggaaactgcctctctgctttgagaacggctgcaaaagctggtgaactattggagaatgatcttggatttgctgctttgaaagtgcatcaagcagtagctgaacatacgagcgaaaaggtatctcaaatgattgatcaatggctaaagtctccttatatttaccatattgatcggctatttgaaccgatgagcgttatgatgggaagctcgccgaggtttaataagtatggttgtgaatttgggttgggaaaaggagtgacgcttagaagtggctatgcgcataagttcgatggaaaggtatctgcttacccgggaagagaaggagggggaagtatagatttggaggtatgtcttgttccagagtttatggaagctttggaatcagatgaagagttcatgtcacttgtttctctttgaaaatttaccaatttcttccaagtttctcaacatttttattttgcacctgatttttcaaaaagaaaagttggaaggtaaagttacaaccctataatccatatatattatttcg

SEQ ID NO: 108149 - protein, 285 aa, Arabidopsis thaliana
  peptide (1)..(285): Ceres Seq. ID no. 13653341
MNHAMGDGTAFWKFFTAWSEIFQGQESNQNDDLCLKNPPVLKRYIPEGYGPLFSLPYSHPDEFIRTYESPILKERMFCFSSETIRMLKTRVNQICGTTSISSFQSLTAVIWRCITRARRLPLDRKTSCRVAADNRGRMYPPLHKDYFGNCLSALRTAAKAGELLENDLGFAALKVHQAVAEHTSEKVSQMIDQWLKSPYIYHIDRLFEPMSVMMGSSPRFNKYGCEFGLGKGVTLRSGYAHKFDGKVSAYPGREGGGSIDLEVCLVPEFMEALESDEEFMSLVSL

SEQ ID NO: 108150 - protein, 281 aa, Arabidopsis thaliana
  peptide (1)..(281): Ceres Seq. ID no. 13653342
MGDGTAFWKFFTAWSEIFQGQESNQNDDLCLKNPPVLKRYIPEGYGPLFSLPYSHPDEFIRTYESPILKERMFCFSSETIRMLKTRVNQICGTTSISSFQSLTAVIWRCITRARRLPLDRKTSCRVAADNRGRMYPPLHKDYFGNCLSALRTAAKAGELLENDLGFAALKVHQAVAEHTSEKVSQMIDQWLKSPYIYHIDRLFEPMSVMMGSSPRFNKYGCEFGLGKGVTLRSGYAHKFDGKVSAYPGREGGGSIDLEVCLVPEFMEALESDEEFMSLVSL

SEQ ID NO: 108151 - protein, 210 aa, Arabidopsis thaliana
  peptide (1)..(210): Ceres Seq. ID no. 13653343
MFCFSSETIRMLKTRVNQICGTTSISSFQSLTAVIWRCITRARRLPLDRKTSCRVAADNRGRMYPPLHKDYFGNCLSALRTAAKAGELLENDLGFAALKVHQAVAEHTSEKVSQMIDQWLKSPYIYHIDRLFEPMSVMMGSSPRFNKYGCEFGLGKGVTLRSGYAHKFDGKVSAYPGREGGGSIDLEVCLVPEFMEALESDEEFMSLVSL

SEQ ID NO: 108152 - DNA, 735 bp, Arabidopsis thaliana
  misc_feature (1)..(735): Ceres Seq. ID no. 13653364
  misc_feature (1)..(735): Ortholog of  Ceres SEQ ID NO 12610679 as cited in SEQ ID NO 56077
gttgtctctccccaattcaaaaaaagaaataacctaaacgtgttcacacagagatctcgagatgaaagataaccaaacggaagttgaatcgaggagcactgatgatagattgaaagttagagggaacaaagttggaaagaaaacaaaggatccaaacaggcctaagaaaccaccaagtcctttcttcgtcttcctgtaaataaaaatcactaatctctcttcttcttttttcttcactaatttgattacagtaattaatatgctctaaataattaccctctcggttgatttaaagggacgatttccgaaaggagtttaatctggctaaccctgacaacaaatccgtcggtaatgttggtagagcagctggaaagaaatggaaaaccatgactgaagaagaaagagcaccttttgtagcaaaatcacagagcaaaaagactgagtatgctgtgactatgcaacagtataacatggaactggctaatggaaacaagacaactggagatgatgagaaacaagagaaagctgctgatgattaggaagttggatcagtgatttgtgtatcaactatatctgttgttttatgtcaacttttagctagcttttagggagaacaattgttacattcctgttttatcctttctgtcaactgtgggattattcagatgtaactttggatttagctttgagcttcaattccaccttttatgagatcatatcatatgtttgcaatct

SEQ ID NO: 108153 - protein, 50 aa, Arabidopsis thaliana
  peptide (1)..(50): Ceres Seq. ID no. 13653365
MTEEERAPFVAKSQSKKTEYAVTMQQYNMELANGNKTTGDDEKQEKAADD

SEQ ID NO: 108154 - protein, 45 aa, Arabidopsis thaliana
  peptide (1)..(45): Ceres Seq. ID no. 13653366
MKDNQTEVESRSTDDRLKVRGNKVGKKTKDPNRPKKPPSPFFVFL

SEQ ID NO: 108155 - DNA, 1729 bp, Arabidopsis thaliana
  misc_feature (1)..(1729): Ceres Seq. ID no. 13653367
  misc_feature (1)..(1729): Ortholog of  Ceres SEQ ID NO 13594349 as cited in SEQ ID NO 58161
  misc_feature (1)..(1729): Ortholog of  Ceres SEQ ID NO 13663419 as cited in SEQ ID NO 66561
  misc_feature (1)..(1729): Ortholog of  Ceres SEQ ID NO 15177892 as cited in SEQ ID NO 0
atctcactacaattcttgatcttcttcttaacttatacctcaaataatggataattatcagaccaagaatatatctaatctattaacttctttgtgttttaccactctcttaatattagctccggtggttatatgcactagacaacaccggttcgatagcccgaaaagaagcttgttggccaacgagcaagatttagtgacaggtttgcctggacagcctgatgtgagtttcagacattatgccggatatgtccctgtcgatgaatccaacggaagagcttttttactggttctttgaggccatggatctcccgaaagagaaacctctagtcctctggcttaatggaggtccaggttgttcttctgtgggatatggggcaacacaagaaattggtccttttctcgtggacaccaacggaaacggacttaactttaatccatacgcatggaataaagaggccaacatgctgtttttagaatctcccgtcggtgttggcttttcgtattcaaacacaagtagcgattatcaaaaacttggagatgactttacagcaagagacgcatacacttttctttgcaactggttcgagaaattcccagagcacaaagaaaatacgttctatatcgcgggtgaaagttatgcaggaaaatacgtacctgagctagcagaggttgtatacgataacaataacaataacaagaagaatggttcaccgtttcacatcaatcttaagggtattttgttggggaatcatgagacatcagatgcagaagattggagaggttgggtggattatgcatggagccatgcagtaatatcagatgagactcataggatcataaccaggacgtgcaatttcagcagcgataatacttggagcaacgatgagtgcaatgaggccgtagcggaagttctcaagcagtatcacgagatagatatctatagcatctatacctcagtttgcataggagattctgcgcgatcgtcttactttgattcagcgcaattcaaaacaaattctcgcattagctccaagaggatgccaccgaggctcatgggtggatatgatccatgcttagatgattacgcgagagtattttacaacagagcagatgttcagaagtctcttcatgcgagtgatggagttaatctcaagaactggagcatttgcaacatggagatctttaataattggactggttcaaacccgtcggttttgcctatttacgagaaactcatcgccggaggattaagaatatgggtttacagtggtgacacagacggaagagttccagtacttgcgactcgttatagcttaaacgcactcgaattacccatcaagacagcttggaggccatggtaccatgaaaaacaggtaagtgggtggcttcaagaatacgaaggtttaacgtttgctacgttcagaggagctggacatgcggtgccttgcttcaaaccaagcagctctctcgcctttttctcggcgtttctcagcggagttcctcctccgccatcgcggtagagaagaaattcaatgattaaaaagatgatttagtacgtaatctaattatgagtatttttgaaagatttttgggttttgtttcgttaacttgtcagacacacgagataggggaaaacaaggattgtaacttgtaagagagaatatgtgatttatgttacgttttatgtcatgatcataatgatcaaaagaaaaccttcaccgctttg

SEQ ID NO: 108156 - protein, 427 aa, Arabidopsis thaliana
  peptide (1)..(427): Ceres Seq. ID no. 13653368
MPDMSLSMNPTEELFYWFFEAMDLPKEKPLVLWLNGGPGCSSVGYGATQEIGPFLVDTNGNGLNFNPYAWNKEANMLFLESPVGVGFSYSNTSSDYQKLGDDFTARDAYTFLCNWFEKFPEHKENTFYIAGESYAGKYVPELAEVVYDNNNNNKKNGSPFHINLKGILLGNHETSDAEDWRGWVDYAWSHAVISDETHRIITRTCNFSSDNTWSNDECNEAVAEVLKQYHEIDIYSIYTSVCIGDSARSSYFDSAQFKTNSRISSKRMPPRLMGGYDPCLDDYARVFYNRADVQKSLHASDGVNLKNWSICNMEIFNNWTGSNPSVLPIYEKLIAGGLRIWVYSGDTDGRVPVLATRYSLNALELPIKTAWRPWYHEKQVSGWLQEYEGLTFATFRGAGHAVPCFKPSSSLAFFSAFLSGVPPPPSR

SEQ ID NO: 108157 - protein, 424 aa, Arabidopsis thaliana
  peptide (1)..(424): Ceres Seq. ID no. 13653369
MSLSMNPTEELFYWFFEAMDLPKEKPLVLWLNGGPGCSSVGYGATQEIGPFLVDTNGNGLNFNPYAWNKEANMLFLESPVGVGFSYSNTSSDYQKLGDDFTARDAYTFLCNWFEKFPEHKENTFYIAGESYAGKYVPELAEVVYDNNNNNKKNGSPFHINLKGILLGNHETSDAEDWRGWVDYAWSHAVISDETHRIITRTCNFSSDNTWSNDECNEAVAEVLKQYHEIDIYSIYTSVCIGDSARSSYFDSAQFKTNSRISSKRMPPRLMGGYDPCLDDYARVFYNRADVQKSLHASDGVNLKNWSICNMEIFNNWTGSNPSVLPIYEKLIAGGLRIWVYSGDTDGRVPVLATRYSLNALELPIKTAWRPWYHEKQVSGWLQEYEGLTFATFRGAGHAVPCFKPSSSLAFFSAFLSGVPPPPSR

SEQ ID NO: 108158 - protein, 420 aa, Arabidopsis thaliana
  peptide (1)..(420): Ceres Seq. ID no. 13653370
MNPTEELFYWFFEAMDLPKEKPLVLWLNGGPGCSSVGYGATQEIGPFLVDTNGNGLNFNPYAWNKEANMLFLESPVGVGFSYSNTSSDYQKLGDDFTARDAYTFLCNWFEKFPEHKENTFYIAGESYAGKYVPELAEVVYDNNNNNKKNGSPFHINLKGILLGNHETSDAEDWRGWVDYAWSHAVISDETHRIITRTCNFSSDNTWSNDECNEAVAEVLKQYHEIDIYSIYTSVCIGDSARSSYFDSAQFKTNSRISSKRMPPRLMGGYDPCLDDYARVFYNRADVQKSLHASDGVNLKNWSICNMEIFNNWTGSNPSVLPIYEKLIAGGLRIWVYSGDTDGRVPVLATRYSLNALELPIKTAWRPWYHEKQVSGWLQEYEGLTFATFRGAGHAVPCFKPSSSLAFFSAFLSGVPPPPSR

SEQ ID NO: 108159 - DNA, 1151 bp, Arabidopsis thaliana
  misc_feature (1)..(1151): Ceres Seq. ID no. 13653371
  misc_feature (1)..(1151): Ortholog of  Ceres SEQ ID NO 12558659 as cited in SEQ ID NO 20727
  misc_feature (1)..(1151): Ortholog of  Ceres SEQ ID NO 14308640 as cited in SEQ ID NO 60489
  misc_feature (1)..(1151): Ortholog of  Ceres SEQ ID NO 13656436 as cited in SEQ ID NO 69154
agctagaaagacaccagtcttaccctaacttttttcaaagtctgtgtctttctgtagaaatctgaggaataaatatttgaatctaaagagaataaagaagaaagtaaaaaagcaaaatcgaagttttgttcaattttctgggatcatagagcaattttcgtttctttattcgttgaaagtgtgaagcttttttgattcagtgagaagtgttaatggcgggttacagagcagatgatgattacgattacctattcaaggtggttctgatcggtgattcaggtgttggaaagtccaatttgctttctcgattcaccaggaacgagtttagtctcgagtctaaatcaacgatcggggtcgagttcgcgactcgtagcttgaatgttaatgaaaaagtcatcaaagcccagatttgggacactgctggtcaagaaagataccgagcaatcactagtgcttactatcgaggagctgttggggcgcttcttgtttacgacgtaacccgacactcaacattcgaaaacgttgagagatggctaagggaactccgtgaccacactgacccaaacatagttgtgatgcttgtgggaaacaaatccgatcttcgccatcttgtagcagtccaaaccgaagatgcaaaatcttttgcagagaatgaatcactctacttcatggaaacctcagctcttgaatctaccaatgttgagaacgcgttttctgaagtactcactcagatttaccatgttgtgagcaagaaagcaatggaggctggtgaagattccggtaatgttccttcgaaaggagagaagatcgatgttgatgtttccgcagtgaagaaaactggttgctgctccaactaaatggtcttatgtcctaaagctgaaatcggtttttaaattttacattcaaattttgtttttgaagatgtttgcttttttttaggaaaacaaactatgttatggcttttgatttgcttgtttgaaaattgcttagctttggtctgattctgtaccggttaagggattttgtaatttaaccggttctggtctatggtttgtttttaattcaatccgcaaatatctctaaaccaatatttattgtgctaatccttgaacacaactaatttttgttataccaatttagaaaattttcgt

SEQ ID NO: 108160 - protein, 214 aa, Arabidopsis thaliana; identical to SEQ ID NO: 27745
  peptide (1)..(214): Ceres Seq. ID no. 13653372

SEQ ID NO: 108161 - DNA, 834 bp, Arabidopsis thaliana
  misc_feature (1)..(834): Ceres Seq. ID no. 13653389
  misc_feature (1)..(834): Ortholog of  Ceres SEQ ID NO 13594974 as cited in SEQ ID NO 56010
  misc_feature (1)..(834): Ortholog of  Ceres SEQ ID NO 13661512 as cited in SEQ ID NO 61464
ccaccaattctctttaacattctccttgatttctgacactaccctcatcgggtctccaagaggccaagaaagacctctttctcggcttctaggagtctcatcattctcttttttcacatttgcttcctccacacgcaacctccaaaaagccctaaatttattaaaacaaatggattccacggagctgaaccgtgtgttccaaatgttcgacaaggacggagacgggaagatcactacgaaggagctgaacgagtcattcaagaacctcggtatcataatacccgaagacgaactaacacaaattatccaaaagatcgatgttaatggtgacggttgtgttgacattgaagagtttggagagctctacaagacgataatggtagaagatgaggacgaggtaggagaagaagatatgaaggaagcgttcaacgtatttgatcggaacggagatgggtttataacggtggatgaattgaaagcggttttatcttccttgggactcaagcaaggtaagaccttggaggaatgtaggaagatgataatgcaagtggatgttgatggtgatggtagggttaattacatggagtttagacaaatgatgaaaaagggtcgcttttttagctctttgagctgataataactttttttcttctttttttaccttctcttgtttttaattttggttatttgcttaaccattttctcttgcggtctaaatggaaaatacatgatcatagactaattattttatcttcaagacatgcgagagcacattgtaaaaaactgtaggtgttttatgtttaaaatgtgatgagtgatgctttgtttacatcc

SEQ ID NO: 108162 - protein, 210 aa, Arabidopsis thaliana
  peptide (1)..(210): Ceres Seq. ID no. 13653390
HQFSLTFSLISDTTLIGSPRGQERPLSRLLGVSSFSFFTFASSTRNLQKALNLLKQMDSTELNRVFQMFDKDGDGKITTKELNESFKNLGIIIPEDELTQIIQKIDVNGDGCVDIEEFGELYKTIMVEDEDEVGEEDMKEAFNVFDRNGDGFITVDELKAVLSSLGLKQGKTLEECRKMIMQVDVDGDGRVNYMEFRQMMKKGRFFSSLS

SEQ ID NO: 108163 - protein, 154 aa, Arabidopsis thaliana; identical to SEQ ID NO: 36976
  peptide (1)..(154): Ceres Seq. ID no. 13653391

SEQ ID NO: 108164 - protein, 143 aa, Arabidopsis thaliana; identical to SEQ ID NO: 36977
  peptide (1)..(143): Ceres Seq. ID no. 13653392

SEQ ID NO: 108165 - DNA, 1042 bp, Arabidopsis thaliana
  misc_feature (1)..(1042): Ceres Seq. ID no. 13653397
  misc_feature (1)..(1042): Ortholog of  Ceres SEQ ID NO 12635162 as cited in SEQ ID NO 0
gagaagagacaagaagacacagaacaagtagccactctctcatctcaccacccctctttctctctacttgctctctatctctctctgtgtctctccactttctcttcttcttcttcttcttcttcttcttgctctagagatctctctatctccattcttttctctctctgtttctagaaagacaacagtgacattttgtctgaacgcatctatggctgctctggtgctttcacttctccttctatccttggctggacattctagtgcctcatggtgtgtgtgtaagacagggctgagtgatacagtgctacaggcaaccctagactatgcttgtggaaatggagcagattgtaatcctactaaaccaaaacaatcttgcttcaaccctgacaatgttaggtctcattgcaactatgcagtcaatagcttcttccaaaagaagggtcaatctcctggctcttgtaatttcgatggaactgccactcccactaactccgatcccagttatacaggttgtgcctttcctactagtgccagtggctctagcggcagcacaactgtgacacctggcacaaccaatccaaaaggcagcccaacgaccaccacacttcctggtagtggtaccaacagtccttattcagggaacccaaccaatggagtttttgggggaaatagcacaggaggcaccactgggacagggattaacccggattacacgacagacagcagcgcgtttgctctcaagaactcaagcaaattgttcatctgccttctcttgatcgcttcgagtggattctgctctttcctgatgctctaaggatgttaatggtctctggttctgtgggtgcacttagttatcgtttcgaggacattttggtctagtttagtggtaatctctgtctctgtgttatgggtctatgttatgtttttgtttgtaagaagatttcagctcttgcagttactcttaattacctctttgactgttctggtagatttgatgccagtgaaaaaaaatcttaatatataattacattatctcgtc

SEQ ID NO: 108166 - protein, 201 aa, Arabidopsis thaliana; identical to SEQ ID NO: 23283
  peptide (1)..(201): Ceres Seq. ID no. 13653398

SEQ ID NO: 108167 - DNA, 1257 bp, Arabidopsis thaliana
  misc_feature (1)..(1257): Ceres Seq. ID no. 13653399
  misc_feature (1)..(1257): Ortholog of  Ceres SEQ ID NO 13597019 as cited in SEQ ID NO 64303
  misc_feature (1)..(1257): Ortholog of  Ceres SEQ ID NO 13654191 as cited in SEQ ID NO 68235
tcatcgctgtggggaacagcgatgagagaaagagaaacactttctgtcctctttttttttcctctctttttctctctcgctggaaaccttttcatattcaagtgtaattttaatatttcaagcaattttctagctaattatggccttggaggctgtagtttacccgcaagatccgttctcctacatctcttgcaaagattttccgttttacgacttatactttcaagaagaagaagatcaagatccacaagatactaagaacaacattaagctagggcaaggacaaggacatggttttgcgagtaataattacaacggtagaaccggagattatagtgatgattataattacaacgaagaggatctccaatggccacgagaccttccttatggatctgccgtcgacaccgagagccagcctccaccgtcggatgtggcggcgggaggagggaggaggaaaaggaggaggacgaggagtagcaagaacaaagaagagatcgagaaccagaggatgactcacatcgccgttgaaagaaatcgccggaaacagatgaacgagtacctcgccgttctccggtctctcatgccaccttattatgctcaaaggggagatcaagcatcgatagtaggcggagccattaactacttaaaggagcttgagcatcatttacaatcaatggaacctccggttaagaccgccacagaagacaccggagccggccacgaccagaccaaaacaacctcggctagttcgtcgggaccattctcggatttctttgcatttcctcagtactcgaaccggcctacctctgcggcggcggctgaggggatggcggagatagaggtaacgatggtagagagccatgcgagtctgaaaatacttgcgaaaaagagaccgagacagcttcttaaactggtctcatcgatacagagcctaaggctcactcttctccatctaaacgtcacaactcgagacgactccgtcctctattccatcagcgtcaaggttgaagaagggagccaattgaatacagtagaagatattgcagcagctgtgaatcaaatcctaaggaggatcgaagaagagtcatcctttagctagtattgttgaattttagttatggcacatttagaggagctctaatttttcatgtgtgatcttttgctctctctttttcatatattaaataatataaatttcctttttctttttgttaacgttaattctaatgcattatatattggagtttttgtgtg

SEQ ID NO: 108168 - protein, 320 aa, Arabidopsis thaliana; identical to SEQ ID NO: 36403
  peptide (1)..(320): Ceres Seq. ID no. 13653400

SEQ ID NO: 108169 - protein, 196 aa, Arabidopsis thaliana; identical to SEQ ID NO: 36404
  peptide (1)..(196): Ceres Seq. ID no. 13653401

SEQ ID NO: 108170 - protein, 183 aa, Arabidopsis thaliana; identical to SEQ ID NO: 36405
  peptide (1)..(183): Ceres Seq. ID no. 13653402

SEQ ID NO: 108171 - DNA, 1534 bp, Arabidopsis thaliana
  misc_feature (1)..(1534): Ceres Seq. ID no. 13653403
  misc_feature (1)..(1534): Ortholog of  Ceres SEQ ID NO 14312216 as cited in SEQ ID NO 53930
  misc_feature (1)..(1534): Ortholog of  Ceres SEQ ID NO 13656404 as cited in SEQ ID NO 65806
  misc_feature (1)..(1534): Ortholog of  Ceres SEQ ID NO 12779935 as cited in SEQ ID NO 66774
  misc_feature (1)..(1534): Ortholog of  Ceres SEQ ID NO 13598695 as cited in SEQ ID NO 67368
  misc_feature (1)..(1534): Ortholog of  Ceres SEQ ID NO 13591174 as cited in SEQ ID NO 68289
aaattttcgcgctcgattcgtcttttctgtatctcccggagctccgggacttgggcggaagaggagatgaggagcttgttgttgtggattgcggtggtcgtgtgcttgctatgttcagtcgcggcggtggttcaaagcggatctagcgacggatttgggaaacccagagatactgagactgcgatatcttttctggagtataaattgatggcgccttcggttccaatgatacctctcaccttgattcacggagctgactctaaaggagctgtgtgcttagatgggacgctacctggttatcatctagatcgtggttttggatcaggtgctaacagttggcttatccagcttgagggtggaggatggtgtaacaaccataggagctgtgtgtatcgcaaaacaagtcgacgtggttcctctaaattcatggaaaaagctttggccttcactggaattttgagcaatagatctgaagagaatcctgacttctttaattggaacaggatcaagttgcgttactgcgatggtgcgtctttctctggtgatagtcaggacgagagttcgcaacttttctatcgaggacaacgaatctggcaagtggctatggaagaattcctgtctttaggcatgaagcaagcaaaccaggctctgctctctggatgttcagctggaggattagcttctattttgcactgtgatgagttcagggaactattacctagttccacgaaagtaaaatgcttaagtgatgctggaatgtttctggactcagtggatgtctctgggggccactcgcttaggaatatgttccaaggtgttgttacagtgcagaacctccaaaaggacttgtccagtacttgtacaaaccatttggatcctacttcgtgcttttttccccagaacttggtttcagacattaaaaccccaatgtttcttctcaacacagcatatgactcttggcagatccaagagagcttagctcctcctactgctgatccaggcggtatctggaaggcatgcaaatcagatcactcgcgatgtaattcatcacagatccaattcttccaagaattcaggaatcaaatgctgtttgctgtaaactcattctcaaactctgaccagaacggtctttatataaactcttgcttcgcgcattgtcagactgaaagacaggacacttggtttgctcaagattctcctcaactaaacggaaagagagtcgcagagtctgtaggtgactggtacttcgaccgagcaaaaaatgtcaaagctatcgattgtccttacccttgtgacacaacatgtcacaatctgattttcgagtgagtaaatcgttgaaccccatttctctgattctttcaaacttataagttataccattattgccttaaattccttccatatttatcctaacttccaaatgtgcaacatttgtgtatctcaaatgagaatcatttagtttgtcgattcagatcataatttatatttgcatgaccttgatttttcgattgaaataagctttctttcgatgttt

SEQ ID NO: 108172 - protein, 441 aa, Arabidopsis thaliana
  peptide (1)..(441): Ceres Seq. ID no. 13653404
KFSRSIRLFCISRSSGTWAEEEMRSLLLWIAVVVCLLCSVAAVVQSGSSDGFGKPRDTETAISFLEYKLMAPSVPMIPLTLIHGADSKGAVCLDGTLPGYHLDRGFGSGANSWLIQLEGGGWCNNHRSCVYRKTSRRGSSKFMEKALAFTGILSNRSEENPDFFNWNRIKLRYCDGASFSGDSQDESSQLFYRGQRIWQVAMEEFLSLGMKQANQALLSGCSAGGLASILHCDEFRELLPSSTKVKCLSDAGMFLDSVDVSGGHSLRNMFQGVVTVQNLQKDLSSTCTNHLDPTSCFFPQNLVSDIKTPMFLLNTAYDSWQIQESLAPPTADPGGIWKACKSDHSRCNSSQIQFFQEFRNQMLFAVNSFSNSDQNGLYINSCFAHCQTERQDTWFAQDSPQLNGKRVAESVGDWYFDRAKNVKAIDCPYPCDTTCHNLIFE

SEQ ID NO: 108173 - protein, 419 aa, Arabidopsis thaliana
  peptide (1)..(419): Ceres Seq. ID no. 13653405
MRSLLLWIAVVVCLLCSVAAVVQSGSSDGFGKPRDTETAISFLEYKLMAPSVPMIPLTLIHGADSKGAVCLDGTLPGYHLDRGFGSGANSWLIQLEGGGWCNNHRSCVYRKTSRRGSSKFMEKALAFTGILSNRSEENPDFFNWNRIKLRYCDGASFSGDSQDESSQLFYRGQRIWQVAMEEFLSLGMKQANQALLSGCSAGGLASILHCDEFRELLPSSTKVKCLSDAGMFLDSVDVSGGHSLRNMFQGVVTVQNLQKDLSSTCTNHLDPTSCFFPQNLVSDIKTPMFLLNTAYDSWQIQESLAPPTADPGGIWKACKSDHSRCNSSQIQFFQEFRNQMLFAVNSFSNSDQNGLYINSCFAHCQTERQDTWFAQDSPQLNGKRVAESVGDWYFDRAKNVKAIDCPYPCDTTCHNLIFE

SEQ ID NO: 108174 - protein, 372 aa, Arabidopsis thaliana
  peptide (1)..(372): Ceres Seq. ID no. 13653406
MAPSVPMIPLTLIHGADSKGAVCLDGTLPGYHLDRGFGSGANSWLIQLEGGGWCNNHRSCVYRKTSRRGSSKFMEKALAFTGILSNRSEENPDFFNWNRIKLRYCDGASFSGDSQDESSQLFYRGQRIWQVAMEEFLSLGMKQANQALLSGCSAGGLASILHCDEFRELLPSSTKVKCLSDAGMFLDSVDVSGGHSLRNMFQGVVTVQNLQKDLSSTCTNHLDPTSCFFPQNLVSDIKTPMFLLNTAYDSWQIQESLAPPTADPGGIWKACKSDHSRCNSSQIQFFQEFRNQMLFAVNSFSNSDQNGLYINSCFAHCQTERQDTWFAQDSPQLNGKRVAESVGDWYFDRAKNVKAIDCPYPCDTTCHNLIFE

SEQ ID NO: 108175 - DNA, 1347 bp, Arabidopsis thaliana
  misc_feature (1)..(1347): Ceres Seq. ID no. 13653407
  misc_feature (1)..(1347): Ortholog of  Ceres SEQ ID NO 13645078 as cited in SEQ ID NO 51158
tcaatgaaacattaatatctctactcatatcgccgacttaaagaatgtctcacagaaagtttgagcatccaagacatggttctttgggtttccttccaaggaaaagagctagccgacaccgtgggaaagtgaaggccttccctaaggatgatccaactaagccttgcagactcacctccttcttgggatacaaagctgggatgactcacattgtgagagatgttgaaaaacctggatcaaaactacacaagaaggaaacatgtgaagctgtgacgatcattgagacacctccaatggtggttgtaggtgtggttggttatgtaaagacacctcgtggtctgcggtctctatgcactgtgtgggctcagcatctgagcgaagaattgagaaggaggttctacaagaactgggccaagtcaaagaagaaggctttcactagatattctaagaaacatgaaactgaagaagggaaaaaagatattcaaagtcaattggagaagatgaagaagtactgctctgtcatcagagttcttgctcacactcagataaggaaaatgaaagggctgaagcagaagaaggcacatctgaatgagattcagatcaatggtggagatatagcaaagaaagttgactatgcctgcagtttatttgaaaaacaagtcccagttgatgccatcttccagaaagatgaaatgattgatatcattggtgtcaccaaaggaaaaggttatgaaggtgtggttacaagatggggagtgacccgacttccaagaaagactcatcgtggtcttcgcaaggttgcttgtatcggtgcttggcatccagctagagtctcctacacggtggctagagctggacaaaacggttaccatcaccgtactgaaatgaacaagaaggtataccgggttgggaaagttggccaggagactcactcagccatgaccgagtatgacagaaccgagaaggatatcacaccaatgggaggatttccccactatgggatagtgaaggaagattatttgatgatcaagggatgttgcgtggggcctaagaaacgtgtggtgactttaagacagactttgcttaagcagacgtctaggcttgctatggaggagatcaagcttaagttcattgacgctgcttccaatgggggacacggtcgtttccagacttctcaagagaaggccaagttctatggtagaaccatcaaagcttagatttctaagtattttgttgttttttgagtttctttctttggtgtttgtcggatttttcttgacagttgatatcaactatcttctcttttttttcttctggatattatcaaagtttctttggtttaagatt

SEQ ID NO: 108176 - protein, 390 aa, Arabidopsis thaliana; identical to SEQ ID NO: 23529
  peptide (1)..(390): Ceres Seq. ID no. 13653408

SEQ ID NO: 108177 - protein, 338 aa, Arabidopsis thaliana; identical to SEQ ID NO: 23530
  peptide (1)..(338): Ceres Seq. ID no. 13653409

SEQ ID NO: 108178 - protein, 307 aa, Arabidopsis thaliana; identical to SEQ ID NO: 85900
  peptide (1)..(307): Ceres Seq. ID no. 13653410

SEQ ID NO: 108179 - DNA, 1240 bp, Arabidopsis thaliana
  misc_feature (1)..(1240): Ceres Seq. ID no. 13653414
  misc_feature (1)..(1240): Ortholog of  Ceres SEQ ID NO 14316382 as cited in SEQ ID NO 57756
actaaacccatctcctatttatactttcttttgggtttttttctctccttcattgaagtagcgtaacattgaagtaagcggtaacatttcggaagaatctctttctttagttgatatgagccaacaacgtacacgctctcggaacccgttcaagattctgtttacgaagaagaacaatgctcgattatcgccaaagcttctctcactgttgaacaatttcgagactaacttgacggtatcgattagagaacttgtaccaaaggataagaatgatatcgttagtgtttcttggatgatacaagccatgcagtctctttgtgagacacacaagagtatcaggacgctcgtgaaggatttagaggttccagtatcggatttggaggaggatttcatttatatcttctctgactttagcttgaagcgggaactctgcaacgcctttacctcagagatatatcatttggaacatggcaatctattactaaagtttgcttttagtaagctggagacaaacagtggcaatattcttcagcgttggaatcagcacatggtttccaagaacccgagtatcgaaaactggggcgcggttttgagtaggctggttgaatcgatggatcatcatcatcatatctccaagaaggggaagaagaaatactctgcggaaggaaaagttctcttacgagttttatacggtgtaaaggtcaagactttatacatattcagcgtgtttgatgcatcgttctcgggttcttccaagaatctcttctatctaaccattccaaaggagatggaggagcttccatgggttcaagctttcatggaactgcagaacactattaacccggagatcaaaaacacatttttatcaggcggattcacggttataaaagatctcgaggctgttgaaaccggtgtgaagaagctttacacagcggtacaagaagggtcggttcctattttgttagtggaaccattggagaagtcagtgatagaactttcggaaaggtttgagctagtctccaaggaaacacgttgcttgtcgaagatggtgatctctgcccgagacgcattgttggagagcctgtggacgaaatgcgcagaagagctaggagtgacattgccaacgatggttaaaagtgttaatatagaggaaaagagctaagacttgtttgtgaatatagaggaaacatgtaattatggtatcgttgatgttaagtaataacaaatgcagataaaaatg

SEQ ID NO: 108180 - protein, 348 aa, Arabidopsis thaliana
  peptide (1)..(348): Ceres Seq. ID no. 13653415
MSQQRTRSRNPFKILFTKKNNARLSPKLLSLLNNFETNLTVSIRELVPKDKNDIVSVSWMIQAMQSLCETHKSIRTLVKDLEVPVSDLEEDFIYIFSDFSLKRELCNAFTSEIYHLEHGNLLLKFAFSKLETNSGNILQRWNQHMVSKNPSIENWGAVLSRLVESMDHHHHISKKGKKKYSAEGKVLLRVLYGVKVKTLYIFSVFDASFSGSSKNLFYLTIPKEMEELPWVQAFMELQNTINPEIKNTFLSGGFTVIKDLEAVETGVKKLYTAVQEGSVPILLVEPLEKSVIELSERFELVSKETRCLSKMVISARDALLESLWTKCAEELGVTLPTMVKSVNIEEKS

SEQ ID NO: 108181 - protein, 289 aa, Arabidopsis thaliana
  peptide (1)..(289): Ceres Seq. ID no. 13653416
MIQAMQSLCETHKSIRTLVKDLEVPVSDLEEDFIYIFSDFSLKRELCNAFTSEIYHLEHGNLLLKFAFSKLETNSGNILQRWNQHMVSKNPSIENWGAVLSRLVESMDHHHHISKKGKKKYSAEGKVLLRVLYGVKVKTLYIFSVFDASFSGSSKNLFYLTIPKEMEELPWVQAFMELQNTINPEIKNTFLSGGFTVIKDLEAVETGVKKLYTAVQEGSVPILLVEPLEKSVIELSERFELVSKETRCLSKMVISARDALLESLWTKCAEELGVTLPTMVKSVNIEEKS

SEQ ID NO: 108182 - protein, 285 aa, Arabidopsis thaliana
  peptide (1)..(285): Ceres Seq. ID no. 13653417
MQSLCETHKSIRTLVKDLEVPVSDLEEDFIYIFSDFSLKRELCNAFTSEIYHLEHGNLLLKFAFSKLETNSGNILQRWNQHMVSKNPSIENWGAVLSRLVESMDHHHHISKKGKKKYSAEGKVLLRVLYGVKVKTLYIFSVFDASFSGSSKNLFYLTIPKEMEELPWVQAFMELQNTINPEIKNTFLSGGFTVIKDLEAVETGVKKLYTAVQEGSVPILLVEPLEKSVIELSERFELVSKETRCLSKMVISARDALLESLWTKCAEELGVTLPTMVKSVNIEEKS

SEQ ID NO: 108183 - DNA, 1393 bp, Arabidopsis thaliana
  misc_feature (1)..(1393): Ceres Seq. ID no. 13653422
  misc_feature (1)..(1393): Ortholog of  Ceres SEQ ID NO 14314925 as cited in SEQ ID NO 57985
  misc_feature (1)..(1393): Ortholog of  Ceres SEQ ID NO 13591365 as cited in SEQ ID NO 62720
atcctttatacttctctggtttcagatttctaagagtcaatttgctgaatcatatatttttcttcagattttcccaagttagtttctgttagtaactctgggataagtttgaggattcagaatagtaaacctattagccctgtctttgctcttgaagcaacttcctccaggagggttgtttgcaaagctgctgctggtgtgtcaggtgacttacctgagagtactcctaaggaacttagtcagtatgagaagattattgagcttttgacaaccctttttccactttgggttattttgggaacacttgttggcatcttcaagccatccttggttacatggttggaaacagatctctttactctaggtcttggatttcttatgctttccatgggtttgactcttacgtttgaagatttcagaagatgtttacgtaatccatggacggtgggtgttggttttcttgctcaatatatgatcaagccaattctaggttttctcattgcaatgactcttaagctttcggcacctcttgcgactggccttatcctagtctcatgctgccctggaggacaggcgtcaaacgttgctacttacatttccaaggggaatgtagcgctctctgtactcatgacaacgtgttcaaccattggggctattataatgactcctcttcttactaagcttcttgctggtcagcttgttcccgttgacgctgctggacttgctcttagtacgttccaagtagtgttggttcctaccataattggagttctggcaaatgagttctttcctaaatttacgtctaagatcataacagtgacgcctctaatcggagtcattctgactactctgctctgtgccagccctattggacaagttgcagatgttttgaaaacccaaggagctcaacttatactcccggtggcactccttcatgctgcagcctttgctattggctattggatttcaaagttttctttcggcgagtccacttcgcgtaccatttctatagaatgtggaatgcaaagttcagcgctcgggttcttgcttgcacaaaagcatttcacaaaccctctagttgctgttccttctgcagtcagtgttgtctgtatggcgcttggcgggagcggcctggccgtgttctggagaaacctaccgattccggcagatgacaaggatgacttcaaagagtaaatgaagtaggaaaggcggtttgcatcttctccaaacgatgtgattgttttgttgtaatgttagtaaacattacaaaatttgtgttgaaaaacatgaaacaaaatgtgtttaagagacatagaaacaagggcgtgcatgatgacaactttgtggtcaaccttttttttatttctcaattaatggacaaatcttttttggc

SEQ ID NO: 108184 - protein, 271 aa, Arabidopsis thaliana; identical to SEQ ID NO: 22581
  peptide (1)..(271): Ceres Seq. ID no. 13653423

SEQ ID NO: 108185 - protein, 268 aa, Arabidopsis thaliana; identical to SEQ ID NO: 22582
  peptide (1)..(268): Ceres Seq. ID no. 13653424

SEQ ID NO: 108186 - protein, 240 aa, Arabidopsis thaliana
  peptide (1)..(240): Ceres Seq. ID no. 13653425
MIKPILGFLIAMTLKLSAPLATGLILVSCCPGGQASNVATYISKGNVALSVLMTTCSTIGAIIMTPLLTKLLAGQLVPVDAAGLALSTFQVVLVPTIIGVLANEFFPKFTSKIITVTPLIGVILTTLLCASPIGQVADVLKTQGAQLILPVALLHAAAFAIGYWISKFSFGESTSRTISIECGMQSSALGFLLAQKHFTNPLVAVPSAVSVVCMALGGSGLAVFWRNLPIPADDKDDFKE

SEQ ID NO: 108187 - DNA, 1828 bp, Arabidopsis thaliana
  misc_feature (1)..(1828): Ceres Seq. ID no. 13653430
  misc_feature (1)..(1828): Ortholog of  Ceres SEQ ID NO 12613725 as cited in SEQ ID NO 68196
gtggagaaagtaaaaaatggcttccattgatgaagaaaggtcacttcttgaagttgaagaatctcttatacaggaagaagtaaaattatatgctgaagatggttcaatagatattcatggaaacccaccattgaagcagacaacaggaaactggaaagcttgtccattcatttttgcaaacgaatgctgcgaacggttggcttattatggaattgccaagaatctcatcacgtacttcacaaatgaattgcatgagactaatgtttctgctgctagacacgtcatgacatggcaaggaacatgttacatcactcctcttattggagctttaatagctgatgcttactggggaagatattggactattgcttgtttctctgccatttatttcaccggaatggttgcattgacactctcagcttcagttccgggtcttaagccagcggaatgcattggctctctatgtccaccagcaacaatggttcagtctacggttttattttcagggctttaccttatcgctcttggcactggaggaatcaaaccatgtgtctcatcctttggtgctgatcagtttgataagaccgatccaagcgaacgagtcagaaaagcttctttctttaactggttttacttcactatcaacattggtgcttttgtttcatctactgttctagtttggattcaagagaattatggatgggaattaggattcttgatacctaccgtgttcatgggacttgctactatgagtttcttctttggcacgccgctttatagatttcagaaaccgagaggtagcccgattactagcgtctgccaagttcttgtagccgcataccgtaaatcgaatctcaaggtccctgaagactccacggacggttacaagaaaatctttttccctctcatttcttgtttgaattgagcattagtctattaacggttaaataaacgggttgtgatatcaatgtacaggtttcttgacaaagcggcaattatatcagaaggagatgcaaacactaacccgtggaagctatgtaccgtgactcaagtcgaagaagttaagattctgttacgtttggtccccatttgggcctcaggaatcatcttctcagttctccattcacagatttacactctctttgttcaacaaggacggtgcatgaaacgaaccatcggcttattcgaaatccctcccgcaactctcgggatgttcgacactgcaagtgttctcatatctgtcccaatctatgaccgcgtcatcgttcccttagtgagacggttcacaggcttagctaaaggattcaccgagctacaaagaatggggattggtctttttgtctctgttttgagcttgacatttgcagctatcgttgagacggttcggttacagttagctagagatcttgatctagtggaaagtggagacattgttccattaaacatcttttggcaaatccctcagtactttttaatgggcactgctggagttttcttctttgttgggaggattgagtttttctatgagcaatctccagattcaatgagaagcttgtgtagtgcttgggctcttctcactactacactaggaaactacttgagctcgttgatcattacccttgtggcgtatttgagcggaaaagattgttggattccttcagacaacattaacaatggacatcttgattacttcttctggcttttggtcagtcttggatctgttaacatacctgtttttgtcttcttctctgtgaaatatactcatatgaaggtttgatctcttcttctggctcttgtgtgtactttcaaaattgtttttttttaaacc

SEQ ID NO: 108188 - protein, 302 aa, Arabidopsis thaliana
  peptide (1)..(302): Ceres Seq. ID no. 13653431
MASIDEERSLLEVEESLIQEEVKLYAEDGSIDIHGNPPLKQTTGNWKACPFIFANECCERLAYYGIAKNLITYFTNELHETNVSAARHVMTWQGTCYITPLIGALIADAYWGRYWTIACFSAIYFTGMVALTLSASVPGLKPAECIGSLCPPATMVQSTVLFSGLYLIALGTGGIKPCVSSFGADQFDKTDPSERVRKASFFNWFYFTINIGAFVSSTVLVWIQENYGWELGFLIPTVFMGLATMSFFFGTPLYRFQKPRGSPITSVCQVLVAAYRKSNLKVPEDSTDGYKKIFFPLISCLN

SEQ ID NO: 108189 - protein, 269 aa, Arabidopsis thaliana
  peptide (1)..(269): Ceres Seq. ID no. 13653432
MYRFLDKAAIISEGDANTNPWKLCTVTQVEEVKILLRLVPIWASGIIFSVLHSQIYTLFVQQGRCMKRTIGLFEIPPATLGMFDTASVLISVPIYDRVIVPLVRRFTGLAKGFTELQRMGIGLFVSVLSLTFAAIVETVRLQLARDLDLVESGDIVPLNIFWQIPQYFLMGTAGVFFFVGRIEFFYEQSPDSMRSLCSAWALLTTTLGNYLSSLIITLVAYLSGKDCWIPSDNINNGHLDYFFWLLVSLGSVNIPVFVFFSVKYTHMKV

SEQ ID NO: 108190 - protein, 213 aa, Arabidopsis thaliana
  peptide (1)..(213): Ceres Seq. ID no. 13653433
MTWQGTCYITPLIGALIADAYWGRYWTIACFSAIYFTGMVALTLSASVPGLKPAECIGSLCPPATMVQSTVLFSGLYLIALGTGGIKPCVSSFGADQFDKTDPSERVRKASFFNWFYFTINIGAFVSSTVLVWIQENYGWELGFLIPTVFMGLATMSFFFGTPLYRFQKPRGSPITSVCQVLVAAYRKSNLKVPEDSTDGYKKIFFPLISCLN

SEQ ID NO: 108191 - DNA, 1386 bp, Arabidopsis thaliana
  misc_feature (1)..(1386): Ceres Seq. ID no. 13653434
  misc_feature (1)..(1386): Ortholog of  Ceres SEQ ID NO 14313264 as cited in SEQ ID NO 67300
  misc_feature (1)..(1386): Ortholog of  Ceres SEQ ID NO 14302824 as cited in SEQ ID NO 67794
gtaaatcgccgaaaacgaaatcgaccttcgttgctctgaaaccctaaaagaagctaaatctagcaatggcgagaagatccgtttcgatatttaatcgccttctggcgaatcctccttctccattcacatcactgtcccgatccatcacctacatgcctagacccggagatggagctccacgaaccgtaaccctaattcccggcgacggaatcggacctttggtgaccggtgcggtggaacaggtcatggaagcgatgcacgcgccagtgcatttcgagagatacgaggttctaggaaacatgagaaaagtccctgaagaagtgatcgagtctgtgaagagaaacaaggtttgtctcaaaggtggattagcgactcctgttggtgggggtgtcagttctttgaatatgcaattgaggaaagaactcgatatcttcgcttctcttgtcaattgcatcaatgtccctggattagtgacgcgacacgaaaatgttgatatcgttgtgataagagagaacactgaaggagagtactcaggtctcgagcatgaggttgttcctggtgttgtcgagagccttaaggtgataacaaagttttgttctgagagaatagcgagatatgcatttgagtatgcgtatctaaacaataggaagaaagtgactgctgttcataaagctaacattatgaagcttgcggatgggctcttccttgaatcttgtagagaggttgctaaacattattcggggattacttacaatgaaataatcgtagacaattgctgtatgcagcttgtcgccaagcctgagcaatttgatgtcatggtgacacctaatttgtatggtaaccttatagcaaacacggcggctggaatagccggtggcactggagtgatgccaggagggaatgttggtgcagaacatgcgatattcgagcaaggtgcatcagcagggaatgtggggaatgataagatggtggaacagaagaaagcgaatccggtggctctacttctctcgtcggctatgatgctaagacatctccggtttcctacttttgctgatcggcttgaaacagcagtgaaacaagtgattaaagaaggaaaatatagaacaaaagatcttggaggagattgtaccacgcaggaagttgttgatgctgtcatagcagctcttgagtgaaaccatgtgagcttctctgcttctgcttgcttcttctttcgtctttttcatttcaactaagagaaaagtgttggttttctctgttttgcgttgctattttttgtttcttgattcatttttgttctctttttgattaatatccgatctcacgtttgagcatgagctctatgttataaaataaaatcaataaggacagacagaagcaatgttgttt

SEQ ID NO: 108192 - protein, 368 aa, Arabidopsis thaliana; identical to SEQ ID NO: 86968
  peptide (1)..(368): Ceres Seq. ID no. 13653435

SEQ ID NO: 108193 - protein, 339 aa, Arabidopsis thaliana; identical to SEQ ID NO: 86969
  peptide (1)..(339): Ceres Seq. ID no. 13653436

SEQ ID NO: 108194 - protein, 308 aa, Arabidopsis thaliana; identical to SEQ ID NO: 86970
  peptide (1)..(308): Ceres Seq. ID no. 13653437

SEQ ID NO: 108195 - DNA, 1380 bp, Arabidopsis thaliana
  misc_feature (1)..(1380): Ceres Seq. ID no. 13653446
  misc_feature (1)..(1380): Ortholog of  Ceres SEQ ID NO 14304120 as cited in SEQ ID NO 58862
  misc_feature (1)..(1380): Ortholog of  Ceres SEQ ID NO 13595658 as cited in SEQ ID NO 59888
  misc_feature (1)..(1380): Ortholog of  Ceres SEQ ID NO 13661330 as cited in SEQ ID NO 61614
  misc_feature (1)..(1380): Ortholog of  Ceres SEQ ID NO 13596025 as cited in SEQ ID NO 62024
  misc_feature (1)..(1380): Ortholog of  Ceres SEQ ID NO 13662324 as cited in SEQ ID NO 62162
  misc_feature (1)..(1380): Ortholog of  Ceres SEQ ID NO 12625713 as cited in SEQ ID NO 64160
  misc_feature (1)..(1380): Ortholog of  Ceres SEQ ID NO 14303564 as cited in SEQ ID NO 65360
  misc_feature (1)..(1380): Ortholog of  Ceres SEQ ID NO 15170103 as cited in SEQ ID NO 66345
  misc_feature (1)..(1380): Ortholog of  Ceres SEQ ID NO 14313495 as cited in SEQ ID NO 0
  misc_feature (1)..(1380): Ortholog of  Ceres SEQ ID NO 15174373 as cited in SEQ ID NO 0
agagcgttcagatttctcttcaacataatcatggcattgaccttcttcttcttgttatcgaatttgttcttctccggtaagaatctgcctgatctcacatatttaaagactctaattatttttaaatttcttcatttttttcaatcttaggagttatgtcaaggagcttcacattttcaaacaaatgcgattacacagtgtggccgggaattctatctaacgccggagtttctccattaccaaccaccggcttcgtcctcctgaaaggcgagacgcgtacaatcaacgcaccgtcatcatgggggggtcgtttctggggaagaacactctgctcaaccgattccgatggaaaattctcgtgtgccaccggagattgcggctccggaaaaatcgaatgctccggcgctggagctgctcctcctgcgactttagctgaattcactctcgatggctccggaggactcgatttctacgatgtcagtctcgtcgacggctacaatgtccagatgctggtggttcctcaaggcggctccggtcagaattgcagcagcaccggctgcgtcgtcgatttaaacggatcttgcccgtcggagctaagggtgaatagcgtcgacgggaaggaggcggtggcgatggcgtgtaaaagtgcgtgcgaggcgtttcggcagccggagtattgctgcagcggcgcgtttggatcgcctgacacgtgtaagccgtctacgtactcgcggatcttcaagagcgcgtgtccacgcgcctatagctacgcgtatgacgataagtctagtacatttacgtgcgcgaaatctcccaactacgtcatcactttctgtccttctcccaacaccagcctaaaatcagctgaggaacacagcacagagacaatgacgacgacaagtccaagttccggcagtacgacgtcgtcgcagatggtctacgaaggtgctctggacgaaagcagtggttcaccatctacgtatcacggcgtatcacgagcaatcacagtcgttcttctctcgcttgctttttgtcgtatgtggtggttcttctgaccagagattatttgtcttagtgtctgccacgtatgcgcagaaacaagaacgtatgggcctttagaaggccttttctcactatagtaaaaatatttctaaagtttttccacataatgtcaactttttactccacatgaccaaacgttgaatgattaaaccattcttaaggaaaatcaagaaagtaggctatattaaagcattaatattggtagtattttagattagtcttaagtctaaacatagtttttaggaataattttataattaattttaaaaattttgatgttaaaaaactaaaattttggcaatatacaatggtggtttt

SEQ ID NO: 108196 - protein, 299 aa, Arabidopsis thaliana; identical to SEQ ID NO: 46829
  peptide (1)..(299): Ceres Seq. ID no. 13653447

SEQ ID NO: 108197 - protein, 182 aa, Arabidopsis thaliana; identical to SEQ ID NO: 46830
  peptide (1)..(182): Ceres Seq. ID no. 13653448

SEQ ID NO: 108198 - DNA, 3148 bp, Arabidopsis thaliana
  misc_feature (1)..(3148): Ceres Seq. ID no. 13653453
  misc_feature (1)..(3148): Ortholog of  Ceres SEQ ID NO 14314423 as cited in SEQ ID NO 52352
atcttctttctatagtttccatgaagtcttcttcttctcagagctacgatgttttccccaacttcagaggggaagatgtccgccactcattagtcagccaccttcgtaaggaacttgatcgcaaattcatcaatacattcaacgacaacaggatcgaaagaagccgcaaaataaccccagagctgttattggctatagaaaactcaaggatctcacttgtcgtcttctctaaaaactatgcttcttccacgtggtgcttagatgaattggtgaagatccaagagtgctatgagaaattggatcaaatggtgattcctattttctacaaagtagatccttctcatgttagaaaacagaccggagagtttggcatggtctttggggagacctgcaagggcagaacagagaatgagaagcgaaaatggatgcgagctctagcagaggtagcacatctagccggagaagatcttcggaactggcgtagcgaagcagaaatgcttgaaaatatcgccaaggatgtttcaaacaaactcttccccccatcaaataatttcagtgacttcgtcgggattgaagctcatatagaggcattgatatcaatgttgcgcttcgactccaagaaagcgcgaatgatagggatttgtgggccttctgaaactggtaagactactataggaagagctttatacagcagactcaaaagcgacttccaccatcgggctttcgtagcatataagagaaaaatacggagcgactatgaccagaagctgtattgggaagaacaatttctatcagaaattctttgtcagaaggatataaagatagaggaatgtggtgcggtggaacaacgactaaagcacacgaaagttcttattgttcttgatgatgttgatgatatagagctactaaaaacgttggtaggacgtatcagatggtttggatctgagagcaaaattgttgtgattactcaaaaaagggaacttctcaaggctcacaacattgcacatgtttatgaagtgggattcccatcagaagaactggctcatcaaatgttttgtcgatatgcttttgggaaaaactctccacctcatggtttcaacgagcttgcagatgaagctgcaaagattgccggtaatcgtcctaaagctctcaagtacgttggttcgtcttttagaagactagacaaggaacaatgggtgaagatgctatcggagttccgtagtaatgggaataaactaaaaatcagctatgatgagttagatggtaaaggtcaagattacgttgcgtgtttaaccaatggttcaaattcccaggtgaaggcagagtggatccacttggcactaggcgtgtctatattacttaacatccgcagtgacggaacgacaattctcaaacatttgagctacaatcgaagcatggcgcaacaagcaaaaatatggtggtatgaaaatttggaaagagtgtgcaagaagtacaatatatgtggcatagatagctcaactaatggtggtggtaagaaagtttgctacgttgggatatacccctatgttttaatacaatatcgtattgcgggacgatattgatagtataaaaacggctaggagataggttaagtctctcgtactggcccattcgtttccacgttttcgatgaagatctggataagaatacatcttatgttgttagttttttccaatttggtatttgcatttagatggtgcatgcaaacccaattgtgtaccaaaaaattctagatattttggatgcacaaaaaactatatcacatcacatgcaatgcataactctcttgcttcacattagctatgcatgcaatgcaggttcaacgtatggacaatgttcaaattcccaatttcaaagaaacatggacgcaagccccgggggaaacaaaaccagtaatcaatccacaaaagattcaccgagagcttctcaagtagagaaggaaaagatcgagtactgtgagccacatgtatatataacacctgccatcttcagtgacggaaccagagctcccaaatacgtggagtctaggtaacgtgaaatctaatctttcacaatatataagtatactttcttttcacatcgtagaatcttaagtagtaacttggaactaggattctatatcaatcaatctttcaacaagtggttgtttgtacttagtagccgaagagtaacccaagtgcaccacgccaaaacatggtggccggagaattgtgaaaaagtgtacgagaaccacaacaacatatatggcatagatagatcaattgacggtggtgataagtttgagggaaaaagtaaagttagtgacggtgggttagacggcaaagatcaaggttcaatgtatggacaaagttcaaattccgagcttcaaataaacatggacgcagacaataggagatgtgaacctgtgagtgagatgcttttcaaaaattacaatgtgtgttcgcctaatggtaagggaagtgatatttgaaaattgcgcatgacgatattgttatctggacttacaattcttactgataagtccctcaagcacatatgcctgcaggtttaaccgatgtaaactgttcaaatccccagtctcaaagaaaattggacgcaagcctaaagaaagacaaaattgtgcatgagtggattcgaaccggtagtggcttcttttttgattttcagggcccaaaatctatagtgagtgctgctcaagtggacgagaaaaatttcgagtactgtgaacaaggtgtgtatataacacttggcatcctcagtggcggaattatagttctcaaacatttggagttcagccgaagaatggcgcaacaagcaaaagtttggtggtcggaaaattggataaaagtgtaccaggagcacaacatatgtggcatagataaatcatttgatggtaggtttgatgatagacgtgtcattcgtcaattaagaccaaactgaagcacggcctggcccttgtaaaagtcaggacttgagctagatacttaagccaagcagatctgtttggctaagtctggtcgggttagcgcgaaattgtcgaaatctgtttaataattgcattcagtgcaagtctttaatttgtacttcatggctttaatacactaattaaacattggatcatttttag

SEQ ID NO: 108199 - protein, 526 aa, Arabidopsis thaliana
  peptide (1)..(526): Ceres Seq. ID no. 13653454
LLSIVSMKSSSSQSYDVFPNFRGEDVRHSLVSHLRKELDRKFINTFNDNRIERSRKITPELLLAIENSRISLVVFSKNYASSTWCLDELVKIQECYEKLDQMVIPIFYKVDPSHVRKQTGEFGMVFGETCKGRTENEKRKWMRALAEVAHLAGEDLRNWRSEAEMLENIAKDVSNKLFPPSNNFSDFVGIEAHIEALISMLRFDSKKARMIGICGPSETGKTTIGRALYSRLKSDFHHRAFVAYKRKIRSDYDQKLYWEEQFLSEILCQKDIKIEECGAVEQRLKHTKVLIVLDDVDDIELLKTLVGRIRWFGSESKIVVITQKRELLKAHNIAHVYEVGFPSEELAHQMFCRYAFGKNSPPHGFNELADEAAKIAGNRPKALKYVGSSFRRLDKEQWVKMLSEFRSNGNKLKISYDELDGKGQDYVACLTNGSNSQVKAEWIHLALGVSILLNIRSDGTTILKHLSYNRSMAQQAKIWWYENLERVCKKYNICGIDSSTNGGGKKVCYVGIYPYVLIQYRIAGRY

SEQ ID NO: 108200 - protein, 520 aa, Arabidopsis thaliana
  peptide (1)..(520): Ceres Seq. ID no. 13653455
MKSSSSQSYDVFPNFRGEDVRHSLVSHLRKELDRKFINTFNDNRIERSRKITPELLLAIENSRISLVVFSKNYASSTWCLDELVKIQECYEKLDQMVIPIFYKVDPSHVRKQTGEFGMVFGETCKGRTENEKRKWMRALAEVAHLAGEDLRNWRSEAEMLENIAKDVSNKLFPPSNNFSDFVGIEAHIEALISMLRFDSKKARMIGICGPSETGKTTIGRALYSRLKSDFHHRAFVAYKRKIRSDYDQKLYWEEQFLSEILCQKDIKIEECGAVEQRLKHTKVLIVLDDVDDIELLKTLVGRIRWFGSESKIVVITQKRELLKAHNIAHVYEVGFPSEELAHQMFCRYAFGKNSPPHGFNELADEAAKIAGNRPKALKYVGSSFRRLDKEQWVKMLSEFRSNGNKLKISYDELDGKGQDYVACLTNGSNSQVKAEWIHLALGVSILLNIRSDGTTILKHLSYNRSMAQQAKIWWYENLERVCKKYNICGIDSSTNGGGKKVCYVGIYPYVLIQYRIAGRY

SEQ ID NO: 108201 - protein, 425 aa, Arabidopsis thaliana
  peptide (1)..(425): Ceres Seq. ID no. 13653456
MVIPIFYKVDPSHVRKQTGEFGMVFGETCKGRTENEKRKWMRALAEVAHLAGEDLRNWRSEAEMLENIAKDVSNKLFPPSNNFSDFVGIEAHIEALISMLRFDSKKARMIGICGPSETGKTTIGRALYSRLKSDFHHRAFVAYKRKIRSDYDQKLYWEEQFLSEILCQKDIKIEECGAVEQRLKHTKVLIVLDDVDDIELLKTLVGRIRWFGSESKIVVITQKRELLKAHNIAHVYEVGFPSEELAHQMFCRYAFGKNSPPHGFNELADEAAKIAGNRPKALKYVGSSFRRLDKEQWVKMLSEFRSNGNKLKISYDELDGKGQDYVACLTNGSNSQVKAEWIHLALGVSILLNIRSDGTTILKHLSYNRSMAQQAKIWWYENLERVCKKYNICGIDSSTNGGGKKVCYVGIYPYVLIQYRIAGRY

SEQ ID NO: 108202 - DNA, 1576 bp, Arabidopsis thaliana
  misc_feature (1)..(1576): Ceres Seq. ID no. 13653457
  misc_feature (1)..(1576): Ortholog of  Ceres SEQ ID NO 14314896 as cited in SEQ ID NO 54010
  misc_feature (1)..(1576): Ortholog of  Ceres SEQ ID NO 14308813 as cited in SEQ ID NO 55485
  misc_feature (1)..(1576): Ortholog of  Ceres SEQ ID NO 13655744 as cited in SEQ ID NO 64032
  misc_feature (1)..(1576): Ortholog of  Ceres SEQ ID NO 13590394 as cited in SEQ ID NO 66581
aggcgctctcatatttctcacattttcgtagccgcaagactcctttcagattcttacttgcagctatgggtaaagagaagtttcacattaacattgtggtcattggtcatgttgattctggaaaatcgaccacaactggtcacttgatctataagcttggtggtattgacaagcgtgtcatcgagaggttcgagaaggaggctgctgagatgaacaagaggtccttcaagtacgcatgggtgttggacaaacttaaggccgagcgtgagcgtggtattaccatcgatattgctctatggaagttcgagaccaccaagtactactgcacagtcattgatgccccaggacatcgtgatttcatcaagaacatgattactggtacctcccaggctgattgtgctgttcttatcattgactccaccactggaggttttgaggctggtatctctaaggatggtcagacccgtgagcacgctcttcttgctttcacccttggtgtcaagcagatgatttgctgttgtaacaagatggatgccaccacccccaaatactccaaggctaggtacgatgaaatcatcaaggaggtgtcttcatacctgaagaaggtcggatacaaccctgacaaaatcccatttgtgccaatctctggattcgagggagacaacatgattgagaggtcaaccaaccttgactggtacaagggaccaactcttcttgaggctcttgaccagatcaacgagcccaagaggccatcagacaagccccttcgtcttccacttcaggatgtctacaagattggtggtattggaacggtgccagtgggacgtgttgagactggtatgatcaagcctggtatggttgttacctttgctcccacagggttgaccactgaggttaagtctgttgagatgcaccacgagtctcttcttgaggcacttcccggtgacaatgttggattcaatgtcaagaatgttgctgtcaaggatcttaagagaggatacgttgcctctaactccaaggatgatccagctaagggtgccgccaacttcacctcccaggtcatcatcatgaaccaccctggtcagattggtaacggttacgccccagttctcgattgccacacctctcacattgcagtcaagttctctgagatcttgaccaagattgacaggcgttctggtaaggagattgagaaggagcccaagtttttgaagaatggtgacgctggtatggttaagatgaccccaaccaagcccatggttgttgagactttctccgagtacccacctttgggacgtttcgctgttagggacatgaggcagaccgttgctgttggtgttattaagagcgtggacaagaaggacccaactggagccaaggtcaccaaggctgcagtgaagaagggtgccaaatgatgagactttcgttatgatcgactctcttatggttttctttggttcttaaaactttgatggcgtttgagcctttttcttttttctctttatttctgtgactttctctctccctcctttttggatatctctgagactttttattatggttttcaattatgcat

SEQ ID NO: 108203 - protein, 470 aa, Arabidopsis thaliana; identical to SEQ ID NO: 40875
  peptide (1)..(470): Ceres Seq. ID no. 13653458

SEQ ID NO: 108204 - protein, 449 aa, Arabidopsis thaliana; identical to SEQ ID NO: 27284
  peptide (1)..(449): Ceres Seq. ID no. 13653459

SEQ ID NO: 108205 - protein, 401 aa, Arabidopsis thaliana; identical to SEQ ID NO: 21437
  peptide (1)..(401): Ceres Seq. ID no. 13653460

SEQ ID NO: 108206 - DNA, 899 bp, Arabidopsis thaliana
  misc_feature (1)..(899): Ceres Seq. ID no. 13653481
  misc_feature (1)..(899): Ortholog of  Ceres SEQ ID NO 13594248 as cited in SEQ ID NO 57340
gacatcgtcattttgacatcggaagaatcttcagtgccgagaaagataaacaaaatggcggcaatcagaacgatgacgaacatgattctacgcgagttcatccatcatccacttctccttcactcttcatcgaaatcgtgtcaatctcttttaccatgtctccgtctcactcccctaatttctccaattcactctaattcccggctcgtatccgtccgatgtgcggcatcgacctccggtggaagcggtggtgatcggaaagtctcttcacggttgtcgcaggtgcaacagatgcttcatgaagccgaagagagagctagttccgctggcaatgagcctactcctcaaatcactctagacaatgttacacttaactttgctagaagtggtggtcctggaggccagaatgtgaacaaattgaataccaaagtagatatgcgcttcaatgttaagaacgcgtattggctgagtgacaggatcagagagaaaatcttactgacggagaagaatcggatcaacaaggatggtgaacttgtgatatcttctaccaaaaccagaacgcagaaaggtaacatcgacgatgcacttgaaaaactacaggcgataattgatgcggcttcatatgttccacctccaccatcagaagaacaaaagaagaaaatagtaaagctcgctgcgaaagctgacaataaacgacttaaaagcaaaaaagttctgtcagacaagaaatctgcgagaagaagccgcggtagttacgatgattaaacttaaaaccatacaatggagtccaggttgattctaaagcttttaacttaaaatgattgttattttcttggaatttaatgtaacacaacaatcaaatcatccaataaaaatttgcagtatattggattttatgt

SEQ ID NO: 108207 - protein, 254 aa, Arabidopsis thaliana
  peptide (1)..(254): Ceres Seq. ID no. 13653482
DIVILTSEESSVPRKINKMAAIRTMTNMILREFIHHPLLLHSSSKSCQSLLPCLRLTPLISPIHSNSRLVSVRCAASTSGGSGGDRKVSSRLSQVQQMLHEAEERASSAGNEPTPQITLDNVTLNFARSGGPGGQNVNKLNTKVDMRFNVKNAYWLSDRIREKILLTEKNRINKDGELVISSTKTRTQKGNIDDALEKLQAIIDAASYVPPPPSEEQKKKIVKLAAKADNKRLKSKKVLSDKKSARRSRGSYDD

SEQ ID NO: 108208 - protein, 236 aa, Arabidopsis thaliana; identical to SEQ ID NO: 26577
  peptide (1)..(236): Ceres Seq. ID no. 13653483

SEQ ID NO: 108209 - protein, 230 aa, Arabidopsis thaliana; identical to SEQ ID NO: 26578
  peptide (1)..(230): Ceres Seq. ID no. 13653484

SEQ ID NO: 108210 - DNA, 835 bp, Arabidopsis thaliana
  misc_feature (1)..(835): Ceres Seq. ID no. 13653493
  misc_feature (1)..(835): Ortholog of  Ceres SEQ ID NO 13597058 as cited in SEQ ID NO 63499
aagaaaagggaaaacaaaggatcttccatgggcgatcgctgagaagatccgcaagaacaaaaacatcaaattccttgaaatcaggaatcttattcgatagtctatttgagcccttgatctggttttttatttggtgaaagttttgaaatggtgctggtattggcattgggggatctccatgtaccccatagagcggctgatctacctcctaagttcaaatcaatgcttgttcctgggaagattcaacacatcatctgcactggaaatctctgcatcaaagaaatccatgactacttgaagactatctgccctgatttgcatatagttcgaggggagtttgacgaagatgcgcgataccctgagaataaaaccttgactattgggcaattcaagctgggattgtgtcatggccaccaggtgatcccatggggtgatctagactcactcgccatgcttcagagacaactgggcgtcgacattctcgtaacaggccatacccaccagttcacagcgtacaaacacgagggaggagtggtgataaacccgggctctgcaaccggagcttacagcagcataaaccaagacgttaacccaagctttgtccttatggacatcgatggtttccgagctgtagtctatgtctatgagctaatcgatggagaagttaaagtcgacaagatcgagttcaagaagccccctactaccagctctggtccgtagttccttaaaaaaaaacttaaaccgttttatgttttcgtctgaaatcactcctaaacatttagaactttcttgtgaaaaataatatttttaacaatttgcaaaacgaaccattgag

SEQ ID NO: 108211 - protein, 190 aa, Arabidopsis thaliana; identical to SEQ ID NO: 21979
  peptide (1)..(190): Ceres Seq. ID no. 13653494

SEQ ID NO: 108212 - protein, 165 aa, Arabidopsis thaliana; identical to SEQ ID NO: 21980
  peptide (1)..(165): Ceres Seq. ID no. 13653495

SEQ ID NO: 108213 - DNA, 757 bp, Arabidopsis thaliana
  misc_feature (1)..(757): Ceres Seq. ID no. 13653508
  misc_feature (1)..(757): Ortholog of  Ceres SEQ ID NO 12624607 as cited in SEQ ID NO 61454
aatgttgttgtttgagagagatgatggctgcgaagcttcagaaatggcgaaatctggcaggtcgtctagatctgatgaatcggagcggcgctgtgtcgacgaggcggttcctgcacgaaggtccagataccgtggaggagcttctcgaaagacatctagcgaagaaagagaaaccaataatcgatcacgatgaggctgagtttctgaatagacggcgtctgacgagcacgcgccgggaagcgttgagtttgtacagagacatattacgagcgactcggttcttcacgtggattgattccaggggaaatttatggagggacgtgttgagagagaacgcgaggaaggagtttgaagcggcgcgatttgagacggatccggaggttatcacaaggcttctgataggtggaagcgacgccgtttcgtctgctttagataagcttgcggagaagcaaagagagatgattgagaaacaacgccgtggtgatcaacgctgatttgacggatcatagggcatgaatgtttcaacagaatgattcatcgagtttaaagtggttggtgtttgaaattcttgctgtaaaatggttgccagaagaagaagcgagatcatttagaaacgtgcttacagaattttgggtttgatgtttgagtgttgtaattcacttgcacaacttacacacttcgtttctgaaattatcattcatgtcattgtagagtttgtatacactgccacagagctataaacaaggctgttgatttt

SEQ ID NO: 108214 - protein, 163 aa, Arabidopsis thaliana
  peptide (1)..(163): Ceres Seq. ID no. 13653509
CCCLREMMAAKLQKWRNLAGRLDLMNRSGAVSTRRFLHEGPDTVEELLERHLAKKEKPIIDHDEAEFLNRRRLTSTRREALSLYRDILRATRFFTWIDSRGNLWRDVLRENARKEFEAARFETDPEVITRLLIGGSDAVSSALDKLAEKQREMIEKQRRGDQR

SEQ ID NO: 108215 - protein, 157 aa, Arabidopsis thaliana
  peptide (1)..(157): Ceres Seq. ID no. 13653510
MMAAKLQKWRNLAGRLDLMNRSGAVSTRRFLHEGPDTVEELLERHLAKKEKPIIDHDEAEFLNRRRLTSTRREALSLYRDILRATRFFTWIDSRGNLWRDVLRENARKEFEAARFETDPEVITRLLIGGSDAVSSALDKLAEKQREMIEKQRRGDQR

SEQ ID NO: 108216 - protein, 156 aa, Arabidopsis thaliana
  peptide (1)..(156): Ceres Seq. ID no. 13653511
MAAKLQKWRNLAGRLDLMNRSGAVSTRRFLHEGPDTVEELLERHLAKKEKPIIDHDEAEFLNRRRLTSTRREALSLYRDILRATRFFTWIDSRGNLWRDVLRENARKEFEAARFETDPEVITRLLIGGSDAVSSALDKLAEKQREMIEKQRRGDQR

SEQ ID NO: 108217 - DNA, 3308 bp, Arabidopsis thaliana
  misc_feature (1)..(3308): Ceres Seq. ID no. 13653524
  misc_feature (1)..(3308): Ortholog of  Ceres SEQ ID NO 13648124 as cited in SEQ ID NO 20362
agagactcgagacgtagaagaagaagacaaacgtgaacgtctttaaattatgaaacctctttcttaaagttctcaagaggtgctcaacaatggcggatcaatctcttctacactctccgatcaacccacatttctttcagcctattcttacagaatctcgcactcacctcaacattcctgtagctttcttctcgaagcatgttgaaggaagaaacaaccaaaacaagactgtgacgctaagatcagacgcgtcggataaaacttggttagtgaagatggacggtctaaaactaaccgacggatgggaagattttgcctttgcacatgatcttcgaactggtgacatcgtcgttttcagacttgaaggagaaatggtgtttcatgtcacagctttaggaccaagctgttgcgagattcaatatcatacatcatctcacaatatcaatgatgatgatcgtaatgatcagatcaacattgcttcaagaaacagttcaagagtgaagaagaatccacgaaagaaagtagagtcttctttagaccattctcgttttgtggcaaaagtctcagcttggtgcctaagcaatgatagactgtatataccactaagtttcgccaggttaaacggtctgaacaaaatcaacagtaagaaaatctatcttcagaacgaagaaggaagatcatggaagttagttttgagacatgacaaatcaggcacgcaaacttttgtccaatccggttggagaagattctgctctgaaaatgggattaggcaaggtcaatatacattcaaacttgtccgaaaatcagcaccacctgtcatccgtttgtgccgcgcaaaagctaaaccaaaacaaagatcagttgcagaatattcatcagaccattcttgttttgagggatctgtcactccttcaagcctaagaaatgatctactgtatcttccaaggagctttgtgaactcaaatcgtctggacaaaagatgcagtgagatagttttaaagaatgaacagggagtaaaatggcctttagttttgaaacgtttcaaatcagtcacttatctcccaaaaggctggactagtttctgtcaagtaaacaggatcaaagcaggagattcattcaagtttaaactggttggaacctggaaaaaacctgttctttctttgtgtccgacacaatccaacaatcacaaaactccattagagtgttcagaaggtaacaaatccgaagaaagtgaagaggattgcttggaggtaaagaaaaagaagtattggtcgagatgcagagcttctgtagaaaacatggatgatgatcagaccaacattggaaacagttcaagaaagaagagagtgagtaagaatccaagagagaaagtagagtcttcatcagaccattctagttttgtgggatctgtcaatccttcaagcctatacaaagatcaactgtatcttccaaggaattttgtgagctcaaattttctggacaaaagatgcagtgagatagttttaaagaatgaacggggagaaaaaaggactttagttttgaaacacttcaaaaaagaccttacttttctcaaaaaaggctggactagtttctgtcaagtaaataggatcaaagctggagattccttcaagtttaaactggttggaacatggaacaaacctgttctttctttgtgccctacagaaaccaactatcacaaaactccattagcgtgttcagagggcaacaaatccgaagaaagtgaagaggagggtactgaagacaagaatacctcacaagattgcttggaggtgaagaaaaggaagtattggtcaacatgcagagcttctgcagagaacatagatgatgatcagaccaatattggaaacagttcaaaagagaagagagtgaagaaaaatccagtaaagaaagcagagtcttcatcagaccattctagttttgtggctaatgtcacagcttcaagcctaaactatgatcgactgtatttaccactaagtttcgtgagttcaaacggtctagataaaatgaacggtaaggagatcgttcttcttaatgaagaaggactatcatggaagtttaatttgaagtacaaccaagcaggcaagcatacttatgtcagacctggttggtcaagattctgtgatgcaaatgggatgagccaaggtcaacaatttacattcaaactggtccaaaaacatggaccacctgtcatgtatttgagcctcagtgaacatagaccaaagtcagaatcttcatcgcaccgttcctattttgtaggatctgtcactgcttcaagcataaagaaagataaactgtatttatggaagagttttgtgagctctaatggtctggacaaaggatgcaagaagataattttaaagaataaatggggaagagaatggaaattagtcttgaaacactacaaatcaaactgctttactattatcaaacgaggctggaccagtttctgccaaggcaacggtttgaaagctggagattccttcaagttcaaactggttggaaccggggaaaagcctgttctttctttgtgccctgcagaatccagccatgaaaaaattccattagagtgtccagaaggtatagatgatgtcaattcactctcctcaaatcctagcagtggagatgacagtagtagatccgaagaaagcgaagaggagaatatggaagacaagaacatctcacaggattgcttggaaaccaagaaaaggaagtattgctcttcatcgtcatatagtcaaaaccgatttgtgacattaactcttacacggtccgcttttcaaacctataaactggtaagcttcttcaacaactatgcctcaaggttgtcttagtatattattttgccacaaaatcatttttttgcagtttcttccgcgcggtttcacgcaggtgaatggcatcaacaagccaaggaagataactctgctgggtcaagatggagttaaaaaggtggtggatctctatcaggaaagtagtagcagaataatgagatttggaaaaggctggagagagttctttgatgctcaaggcgtgaagatagacgactcctttgtgttggaactcatttgggagaaagaagcaagtccggtgcttaagttctgcaccaaagtaccaaagtaaactctgcttgagactgtttccagagaagtagcttgtggtgtgtctcaacacattctctcattccctcgatttctttagcttttgcaactcttgactagatgtctacatatctgagtcttgtttaagagttgaagaaaatgttacgacttaactacttgtgtgttgtg

SEQ ID NO: 108218 - protein, 920 aa, Arabidopsis thaliana
  peptide (1)..(920): Ceres Seq. ID no. 13653525
MADQSLLHSPINPHFFQPILTESRTHLNIPVAFFSKHVEGRNNQNKTVTLRSDASDKTWLVKMDGLKLTDGWEDFAFAHDLRTGDIVVFRLEGEMVFHVTALGPSCCEIQYHTSSHNINDDDRNDQINIASRNSSRVKKNPRKKVESSLDHSRFVAKVSAWCLSNDRLYIPLSFARLNGLNKINSKKIYLQNEEGRSWKLVLRHDKSGTQTFVQSGWRRFCSENGIRQGQYTFKLVRKSAPPVIRLCRAKAKPKQRSVAEYSSDHSCFEGSVTPSSLRNDLLYLPRSFVNSNRLDKRCSEIVLKNEQGVKWPLVLKRFKSVTYLPKGWTSFCQVNRIKAGDSFKFKLVGTWKKPVLSLCPTQSNNHKTPLECSEGNKSEESEEDCLEVKKKKYWSRCRASVENMDDDQTNIGNSSRKKRVSKNPREKVESSSDHSSFVGSVNPSSLYKDQLYLPRNFVSSNFLDKRCSEIVLKNERGEKRTLVLKHFKKDLTFLKKGWTSFCQVNRIKAGDSFKFKLVGTWNKPVLSLCPTETNYHKTPLACSEGNKSEESEEEGTEDKNTSQDCLEVKKRKYWSTCRASAENIDDDQTNIGNSSKEKRVKKNPVKKAESSSDHSSFVANVTASSLNYDRLYLPLSFVSSNGLDKMNGKEIVLLNEEGLSWKFNLKYNQAGKHTYVRPGWSRFCDANGMSQGQQFTFKLVQKHGPPVMYLSLSEHRPKSESSSHRSYFVGSVTASSIKKDKLYLWKSFVSSNGLDKGCKKIILKNKWGREWKLVLKHYKSNCFTIIKRGWTSFCQGNGLKAGDSFKFKLVGTGEKPVLSLCPAESSHEKIPLECPEGIDDVNSLSSNPSSGDDSSRSEESEEENMEDKNISQDCLETKKRKYCSSSSYSQNRFVTLTLTRSAFQTYKLVSFFNNYASRLS

SEQ ID NO: 108219 - protein, 858 aa, Arabidopsis thaliana
  peptide (1)..(858): Ceres Seq. ID no. 13653526
MDGLKLTDGWEDFAFAHDLRTGDIVVFRLEGEMVFHVTALGPSCCEIQYHTSSHNINDDDRNDQINIASRNSSRVKKNPRKKVESSLDHSRFVAKVSAWCLSNDRLYIPLSFARLNGLNKINSKKIYLQNEEGRSWKLVLRHDKSGTQTFVQSGWRRFCSENGIRQGQYTFKLVRKSAPPVIRLCRAKAKPKQRSVAEYSSDHSCFEGSVTPSSLRNDLLYLPRSFVNSNRLDKRCSEIVLKNEQGVKWPLVLKRFKSVTYLPKGWTSFCQVNRIKAGDSFKFKLVGTWKKPVLSLCPTQSNNHKTPLECSEGNKSEESEEDCLEVKKKKYWSRCRASVENMDDDQTNIGNSSRKKRVSKNPREKVESSSDHSSFVGSVNPSSLYKDQLYLPRNFVSSNFLDKRCSEIVLKNERGEKRTLVLKHFKKDLTFLKKGWTSFCQVNRIKAGDSFKFKLVGTWNKPVLSLCPTETNYHKTPLACSEGNKSEESEEEGTEDKNTSQDCLEVKKRKYWSTCRASAENIDDDQTNIGNSSKEKRVKKNPVKKAESSSDHSSFVANVTASSLNYDRLYLPLSFVSSNGLDKMNGKEIVLLNEEGLSWKFNLKYNQAGKHTYVRPGWSRFCDANGMSQGQQFTFKLVQKHGPPVMYLSLSEHRPKSESSSHRSYFVGSVTASSIKKDKLYLWKSFVSSNGLDKGCKKIILKNKWGREWKLVLKHYKSNCFTIIKRGWTSFCQGNGLKAGDSFKFKLVGTGEKPVLSLCPAESSHEKIPLECPEGIDDVNSLSSNPSSGDDSSRSEESEEENMEDKNISQDCLETKKRKYCSSSSYSQNRFVTLTLTRSAFQTYKLVSFFNNYASRLS

SEQ ID NO: 108220 - protein, 826 aa, Arabidopsis thaliana
  peptide (1)..(826): Ceres Seq. ID no. 13653527
MVFHVTALGPSCCEIQYHTSSHNINDDDRNDQINIASRNSSRVKKNPRKKVESSLDHSRFVAKVSAWCLSNDRLYIPLSFARLNGLNKINSKKIYLQNEEGRSWKLVLRHDKSGTQTFVQSGWRRFCSENGIRQGQYTFKLVRKSAPPVIRLCRAKAKPKQRSVAEYSSDHSCFEGSVTPSSLRNDLLYLPRSFVNSNRLDKRCSEIVLKNEQGVKWPLVLKRFKSVTYLPKGWTSFCQVNRIKAGDSFKFKLVGTWKKPVLSLCPTQSNNHKTPLECSEGNKSEESEEDCLEVKKKKYWSRCRASVENMDDDQTNIGNSSRKKRVSKNPREKVESSSDHSSFVGSVNPSSLYKDQLYLPRNFVSSNFLDKRCSEIVLKNERGEKRTLVLKHFKKDLTFLKKGWTSFCQVNRIKAGDSFKFKLVGTWNKPVLSLCPTETNYHKTPLACSEGNKSEESEEEGTEDKNTSQDCLEVKKRKYWSTCRASAENIDDDQTNIGNSSKEKRVKKNPVKKAESSSDHSSFVANVTASSLNYDRLYLPLSFVSSNGLDKMNGKEIVLLNEEGLSWKFNLKYNQAGKHTYVRPGWSRFCDANGMSQGQQFTFKLVQKHGPPVMYLSLSEHRPKSESSSHRSYFVGSVTASSIKKDKLYLWKSFVSSNGLDKGCKKIILKNKWGREWKLVLKHYKSNCFTIIKRGWTSFCQGNGLKAGDSFKFKLVGTGEKPVLSLCPAESSHEKIPLECPEGIDDVNSLSSNPSSGDDSSRSEESEEENMEDKNISQDCLETKKRKYCSSSSYSQNRFVTLTLTRSAFQTYKLVSFFNNYASRLS

SEQ ID NO: 108221 - DNA, 1678 bp, Arabidopsis thaliana
  misc_feature (1)..(1678): Ceres Seq. ID no. 13653555
  misc_feature (1)..(1678): Ortholog of  Ceres SEQ ID NO 13581273 as cited in SEQ ID NO 54551
  misc_feature (1)..(1678): Ortholog of  Ceres SEQ ID NO 13594209 as cited in SEQ ID NO 59089
  misc_feature (1)..(1678): Ortholog of  Ceres SEQ ID NO 14306857 as cited in SEQ ID NO 60035
  misc_feature (1)..(1678): Ortholog of  Ceres SEQ ID NO 14307960 as cited in SEQ ID NO 66187
  misc_feature (1)..(1678): Ortholog of  Ceres SEQ ID NO 13502874 as cited in SEQ ID NO 66298
  misc_feature (1)..(1678): Ortholog of  Ceres SEQ ID NO 12614124 as cited in SEQ ID NO 68392
tcatcgctgtctggaacagcgaagaaaatggacctcacccaaatcctactcctctcctttctctttctcactatctccatcaaactcttgctcacaaaatctaaccggaaacctaatcttcctccttctccggcttaccctttaccggttatcggccacctccacctcctcaagcaaccggtccaccgaacattccactccatctctaagtcccttggaaatgctccaatcttccacctccgcctgggaaaccgcctcgtttacgtcatctcctcacactccatagccgaagaatgtttcaccaaaaacgacgtcgttcttgcgaaccgtcctgatatcatcatggccaaacacgtcggctataactttaccaatatgattgcagcatcttacggcgaccactggaggaatctccgccgcatcgccgccgtcgagatattttcttctcatagaatcagtaccttttcttctatccgtaaagacgagatccgacggctcataacacatctctctagagactccttgcacggatttgttgaagtggagttgaaatcgttattaaccaacttggcattcaacaacatcatcatgatggtagccggaaaacgatattacggtaccggtacagaagacaatgatgaagccaagctcgtgagggaacttatagcggagataatggccggcgccggttctggaaatttggctgattatcttccgtccataaattgggtcacaaactttgagaaccagaccaaaatcttggggaatcgactcgatagagtcctgcaaaaactggttgatgagaaacgtgcagagaaagaaaagggtcaaactttgatcgatcatttgctttctttccaagaaaccgaacccgagtactatactgatgtcatcatcaaaggaatcatactggctttggttcttgcggggacagatacatcttcagtgacgttggaatgggcaatgtcaaatttgctgaaccatccagagatacttgagaaagcgagagcggagatcgatgataaaatcggttcagaccggttagttgaagaatcagatattgtaaatctccattatctccaaaacattgtgtcagaaacattacgtttgtatcctgcggttccactactactccctcatttctcatcggatgaatgtaaagtggcgggctacgatatgccacgtcgcacgttgttattaacaaacgtatgggcgatgcatagagatccaggtttatgggaagagccagagaggttcaagccggagaggttcgagaaagaaggagaggctcgaaagctaatgccgtttgggatgggacgacgagcttgtcctggagctgagcttgggaagcggttagtgagccttgctcttgggtgcttgattcagtctttcgagtgggagagagttggtgcagaacttgtggacatgactgaaggcgaagggatcactatgcctaaagctactccgttgcgagctatgtgcaaggcacgtgccattgttggtaaaacgatataattgacgtatgtaggatctattgtgtagaaacctatatagtttcttacattccacgtgttcatggaaaataaaagtattctgtggtcaattagttggatgcagagcaatgtcacggcttctatagaaagttcaacagaaccaaaatttcactgtttccatctcg

SEQ ID NO: 108222 - protein, 504 aa, Arabidopsis thaliana
  peptide (1)..(504): Ceres Seq. ID no. 13653556
SSLSGTAKKMDLTQILLLSFLFLTISIKLLLTKSNRKPNLPPSPAYPLPVIGHLHLLKQPVHRTFHSISKSLGNAPIFHLRLGNRLVYVISSHSIAEECFTKNDVVLANRPDIIMAKHVGYNFTNMIAASYGDHWRNLRRIAAVEIFSSHRISTFSSIRKDEIRRLITHLSRDSLHGFVEVELKSLLTNLAFNNIIMMVAGKRYYGTGTEDNDEAKLVRELIAEIMAGAGSGNLADYLPSINWVTNFENQTKILGNRLDRVLQKLVDEKRAEKEKGQTLIDHLLSFQETEPEYYTDVIIKGIILALVLAGTDTSSVTLEWAMSNLLNHPEILEKARAEIDDKIGSDRLVEESDIVNLHYLQNIVSETLRLYPAVPLLLPHFSSDECKVAGYDMPRRTLLLTNVWAMHRDPGLWEEPERFKPERFEKEGEARKLMPFGMGRRACPGAELGKRLVSLALGCLIQSFEWERVGAELVDMTEGEGITMPKATPLRAMCKARAIVGKTI

SEQ ID NO: 108223 - protein, 495 aa, Arabidopsis thaliana; identical to SEQ ID NO: 50488
  peptide (1)..(495): Ceres Seq. ID no. 13653557

SEQ ID NO: 108224 - protein, 390 aa, Arabidopsis thaliana; identical to SEQ ID NO: 50489
  peptide (1)..(390): Ceres Seq. ID no. 13653558

SEQ ID NO: 108225 - DNA, 1200 bp, Arabidopsis thaliana
  misc_feature (1)..(1200): Ceres Seq. ID no. 13653559
  misc_feature (1)..(1200): Ortholog of  Ceres SEQ ID NO 15178317 as cited in SEQ ID NO 52489
  misc_feature (1)..(1200): Ortholog of  Ceres SEQ ID NO 14314415 as cited in SEQ ID NO 57442
aaaaatcgaatcaagcatcttcttctttcacgtacgaaacaaaaagctcagagcagagtcgaatcgcgatgaagcatcgagttcggtgttcatgaaggtcagagagttaagtattagcagaactggttaggtcttagtgacaaacaaggtattcatgttatccatccctgatactagaatgtggaatctagcatcgagttatcttacgggaaacattggaccgaaaaacgatatcagaagaccggtccatgctcatgcggagtgttcagatgacgatgtatcttctgtaggtagtaaagacgaaggtctcgagtgtcctatatgctgggaatcatttaatatagttgaaaacgttccgtatgtgttatggtgtggacatacgatgtgtaaaaactgcattttgggacttcaatgggctattgtgaaattgcctactcacccggttcagcttcctctcttcatttcatgcccctggtgcaaccttttgtctttccgtctggtcttcagaggaacactcagattccctcacaagaactactttgtgctttggatggtcgagaggatgaatggagagagacgtaactcacctggtggagctcaaacagatggaaacaatgatcatacaagggaaactccatctccatgtctccacaatcgccatcatcgcagtcaacctgaaccatcacgttctgttaatgatcatcgcattccaagggacaacatacaaacttcactgaggaagtctctggttttctttgtccagttgacagcaaagttcccattagttgtcatatttctgctgataatactctatgcaataccgaccagtgcagccatattggcgatgtacattctagtcactctcttgctggctctaccgtcgtttctcatcctctacttcgcttatccttgtctcgactggcttgttcgagagattgtcacatgaactttctaaggatgcgttcagaaacttcccattcctaatttgacgacttttcttcaacaactgagacccaagatcggtcatgtaagtataacaatttcgtaattaccgtcttctttatctatatatggatgtagttttggattgcattgttgctctacgaagctggacgtatgtgttgtaagggctcttgcagaaacttattagtatttgtggatttgtttgtgagtgtttgagtgtctcaataagatttatgt

SEQ ID NO: 108226 - protein, 263 aa, Arabidopsis thaliana; identical to SEQ ID NO: 38728
  peptide (1)..(263): Ceres Seq. ID no. 13653560

SEQ ID NO: 108227 - protein, 255 aa, Arabidopsis thaliana; identical to SEQ ID NO: 38729
  peptide (1)..(255): Ceres Seq. ID no. 13653561

SEQ ID NO: 108228 - protein, 187 aa, Arabidopsis thaliana; identical to SEQ ID NO: 38730
  peptide (1)..(187): Ceres Seq. ID no. 13653562

SEQ ID NO: 108229 - DNA, 1062 bp, Arabidopsis thaliana
  misc_feature (1)..(1062): Ceres Seq. ID no. 13653563
  misc_feature (1)..(1062): Ortholog of  Ceres SEQ ID NO 13600601 as cited in SEQ ID NO 497
  misc_feature (1)..(1062): Ortholog of  Ceres SEQ ID NO 13664283 as cited in SEQ ID NO 61283
  misc_feature (1)..(1062): Ortholog of  Ceres SEQ ID NO 12635513 as cited in SEQ ID NO 0
  misc_feature (1)..(1062): Ortholog of  Ceres SEQ ID NO 12635723 as cited in SEQ ID NO 0
catgggttccgagtcatcgctgtctggaacagcgatgactagctagacattttcgttttcatctccccacgaatcaaagatggcttttgccattgcttctgctctcacttccacactcacattatccacgagcagagtcaaaaatcctacccagagaagaccacatgtagcgtccacatcatccaccggtggaagattaatgagagagcgcttggtggtggttcgtgccggcaaagaagtttctagcgtctgtgaaccacttcctccggaccgtcctttatggttccctggtagctctccacctgaatggctcgatggcagcttacctggtgatttcggtttcgatcctctcggtttagggtctgatccggacaccctcaaatggtttgcacaagctgagcttatacatagccggtgggcaatgctggccgtgaccggtatcataataccagaatgtctcgagcggttaggtttcattgaaaatttctcatggtatgacgcagggtctcgtgagtacttcgcggattccactacgctgtttgtggctcaaatggttttaatgggctgggcagaaggtagaagatgggctgatttgattaaaccggggtctgttgacatagaaccaaagtacccgcataaagtaaatcctaaaccggatgttggttaccctggaggtttgtggttcgattttatgatgtgggggagaggttctcctgaaccggtaatggttttgaggactaaagagattaagaacggacggctcgcgatgcttgctttccttgggttctgtttccaagctacctacactagccaagatccaattgagaatctcatggctcatctggctgatcctggtcattgcaacgtcttttcggcatttacatcacattaatgaggattagcttggggcgaatataatattttttatatatttatggatgttgaacttttgtatagtgtcactcgccgttgttacaacttctgcttacttaattaacatgtaaaatatattttatatatatgtagaagaaagaaacaagaagagaaaatgagcattattat

SEQ ID NO: 108230 - protein, 270 aa, Arabidopsis thaliana
  peptide (1)..(270): Ceres Seq. ID no. 13653564
MAFAIASALTSTLTLSTSRVKNPTQRRPHVASTSSTGGRLMRERLVVVRAGKEVSSVCEPLPPDRPLWFPGSSPPEWLDGSLPGDFGFDPLGLGSDPDTLKWFAQAELIHSRWAMLAVTGIIIPECLERLGFIENFSWYDAGSREYFADSTTLFVAQMVLMGWAEGRRWADLIKPGSVDIEPKYPHKVNPKPDVGYPGGLWFDFMMWGRGSPEPVMVLRTKEIKNGRLAMLAFLGFCFQATYTSQDPIENLMAHLADPGHCNVFSAFTSH

SEQ ID NO: 108231 - protein, 230 aa, Arabidopsis thaliana; identical to SEQ ID NO: 36595
  peptide (1)..(230): Ceres Seq. ID no. 13653565

SEQ ID NO: 108232 - protein, 156 aa, Arabidopsis thaliana; identical to SEQ ID NO: 36596
  peptide (1)..(156): Ceres Seq. ID no. 13653566

SEQ ID NO: 108233 - DNA, 1189 bp, Arabidopsis thaliana
  misc_feature (1)..(1189): Ceres Seq. ID no. 13653567
  misc_feature (1)..(1189): Ortholog of  Ceres SEQ ID NO 14315028 as cited in SEQ ID NO 57989
agttaccaattttctctcactaaatcagaaatgccgccgtcgttaccgtctctgcaactccgacggcttctcctccgtagcttcatttcctcctcctccgtcaatactcttcaatctcagccccgtatcatttcttccaagccgttgttttctcctcttcccccttcccgttcctctatattctcaacatttccttctagattcttctcatctgaaacgaatgcggaatcggaatctttggattcgaatgagatcgctctctctttctcgaaggatttgagataggaaccaaagcgtataacatgatgcttgattgtgtttgtaagctttgtaggaagaaagatccttttaagcttcaacctgaagtagagaaggttttgctggagatggagtttcgtggtgtacctagaaacacagagactttcaatgtgttgattaacaatctttgtaaaatcaggagaactgaagaagcaatgacattgtttggtaggatgggtgaatggggttgtcaaccagatgctgagacttatcttgttctgattaggagtttgtatcaagcagcgaggatcggtgaaggggacgaaatgatcgataagatgaaatcagcgggatatggtgagcttttgaataagaaagagtattacgggtttctcaagatattgtgtgggattgagaggcttgagcatgcgatgagtgtgtttaagagcatgaaagctaatggatgcaaacctgggatcaagacttatgatttgttgatggggaaaatgtgtgcgaataaccagctgactagagctaatggtttgtataaagaagcggctaagaaaggaatcgctgttagccctaaggaatacagagtagatccacggtttatgaaaaagaagaccaaggaagtggatagcaatgttaagaagagggagactttgcctgagaaaaccgcgaggaagaagaaacggctcaagcagatcaatatgagttttgttaagaaaccgcacaataagatgagacggagaatgtgatgctgatgaatcttcaacatctgatagaattttctaaagattattgtctttgttctttcctttttaagatattgtcaagagtactcatcattttgcttgatcatgagcaaattgtcccaataatcttttgttttgtctcagtgtaacgtttactaagagttcatgcttggccc

SEQ ID NO: 108234 - protein, 237 aa, Arabidopsis thaliana
  peptide (1)..(237): Ceres Seq. ID no. 13653568
MMLDCVCKLCRKKDPFKLQPEVEKVLLEMEFRGVPRNTETFNVLINNLCKIRRTEEAMTLFGRMGEWGCQPDAETYLVLIRSLYQAARIGEGDEMIDKMKSAGYGELLNKKEYYGFLKILCGIERLEHAMSVFKSMKANGCKPGIKTYDLLMGKMCANNQLTRANGLYKEAAKKGIAVSPKEYRVDPRFMKKKTKEVDSNVKKRETLPEKTARKKKRLKQINMSFVKKPHNKMRRRM

SEQ ID NO: 108235 - protein, 236 aa, Arabidopsis thaliana
  peptide (1)..(236): Ceres Seq. ID no. 13653569
MLDCVCKLCRKKDPFKLQPEVEKVLLEMEFRGVPRNTETFNVLINNLCKIRRTEEAMTLFGRMGEWGCQPDAETYLVLIRSLYQAARIGEGDEMIDKMKSAGYGELLNKKEYYGFLKILCGIERLEHAMSVFKSMKANGCKPGIKTYDLLMGKMCANNQLTRANGLYKEAAKKGIAVSPKEYRVDPRFMKKKTKEVDSNVKKRETLPEKTARKKKRLKQINMSFVKKPHNKMRRRM

SEQ ID NO: 108236 - protein, 209 aa, Arabidopsis thaliana
  peptide (1)..(209): Ceres Seq. ID no. 13653570
MEFRGVPRNTETFNVLINNLCKIRRTEEAMTLFGRMGEWGCQPDAETYLVLIRSLYQAARIGEGDEMIDKMKSAGYGELLNKKEYYGFLKILCGIERLEHAMSVFKSMKANGCKPGIKTYDLLMGKMCANNQLTRANGLYKEAAKKGIAVSPKEYRVDPRFMKKKTKEVDSNVKKRETLPEKTARKKKRLKQINMSFVKKPHNKMRRRM

SEQ ID NO: 108237 - DNA, 1684 bp, Arabidopsis thaliana
  misc_feature (1)..(1684): Ceres Seq. ID no. 13653579
  misc_feature (1)..(1684): Ortholog of  Ceres SEQ ID NO 13654989 as cited in SEQ ID NO 63117
  misc_feature (1)..(1684): Ortholog of  Ceres SEQ ID NO 13657138 as cited in SEQ ID NO 65923
  misc_feature (1)..(1684): Ortholog of  Ceres SEQ ID NO 13584744 as cited in SEQ ID NO 69137
aaattacttgtttcaatggagtttttgtttgtttgatttcctctgttacttatgcagcaaaagaagaaattgagtttaaaggagaagtgtgagaaggaagtttcaggaagatgggtgaagaaaagaggagaatttcaggaagatcagtttcacttccatcgatagacatattactagacgagaaaccaggttggccatttcttaaaagagcaagtttagggacaccacaacaagttcacaaatggcacacacgaaaagtctcagtggtcaattgggtcatgagcttacctgaacggtttccaaatcatcaacagactctaaactatgagacaagcttgataaagaaacaaatcaaggacatattgagagacaataacaaatggttcaactacaatgttcttaggaaagcaacatcagatttctctcaagagaatgtgattgggaaaggaggatgcaacgaagtgtaccgagggattcttgaagatggaaaaggcattgcagtgaaaatcttgaagtcatcatctaaagaagcaatgacaaatttcgttcatgaaatcaacattatctcttctttgagtcaccaaaacatctcaccgttacttggtgtttgtgtccaagacaatgaactaatctccgtttacaatctttcaaacacaggaagtttagaagaaacccttcacggtaagcaaaagggaaagtatgtattatcatgggaagagagattcaagatagctatcgggttggcggaagcattagactatcttcataaccgatgttctaagccagtgattcatagagatgtcaaaacttctaacgtccttctatcacttgagctccaacctcaggtaatctgtcagattttggtctgtcgatgtggggaccgacaacatcttctcgatattcgatacaaggtgatgtggtgggaacatttggatatcttgcaccggagtacttcatgtatggaaaagtcagtgataaagttgatgtttacgcctttggagtggttctgcttgaactcatttctggaagaaatcctatttcacctcagaatcctagaggacaagagagtttggtaatgtgggcaaagcctttgattgataccggaaatttaaaagtactgttggatccagacgttacagatatattcgacgagtctcagtttcaaagaatggtacttgctgcttcacattgcctcacaagatcagccacacatcgtcccaatataagacaagtaagattttgtttcattccttaagaaagctaagtccctcatgcaagaactaatctttaacgtttcttcagatactgaggctactaagagatgaaaacgaagccgggaaatggattatggaagaagaaggaaatgaagattgcttcgatgacgaggtttacccgaattccagcacagaattacacttaaaccttgcgatgcttgaggtggaagacgatgaaactgcatcaatcagcagcatggagagaagtaacaacggccttttttcttctacttgttcatctagggagcttcaaacataaggaattatgcttttagctaatagagaggttaggtacttaggttagaggtttgtttcttagtgtatggagtttacttgataactttatgttagacctgagctccctgctgttatctggaccagaaaattcattcccaagacgaatcattctc

SEQ ID NO: 108238 - protein, 321 aa, Arabidopsis thaliana
  peptide (1)..(321): Ceres Seq. ID no. 13653580
MGEEKRRISGRSVSLPSIDILLDEKPGWPFLKRASLGTPQQVHKWHTRKVSVVNWVMSLPERFPNHQQTLNYETSLIKKQIKDILRDNNKWFNYNVLRKATSDFSQENVIGKGGCNEVYRGILEDGKGIAVKILKSSSKEAMTNFVHEINIISSLSHQNISPLLGVCVQDNELISVYNLSNTGSLEETLHGKQKGKYVLSWEERFKIAIGLAEALDYLHNRCSKPVIHRDVKTSNVLLSLELQPQVICQILVCRCGDRQHLLDIRYKVMWWEHLDILHRSTSCMEKSVIKLMFTPLEWFCLNSFLEEILFHLRILEDKRVW

SEQ ID NO: 108239 - protein, 265 aa, Arabidopsis thaliana
  peptide (1)..(265): Ceres Seq. ID no. 13653581
MSLPERFPNHQQTLNYETSLIKKQIKDILRDNNKWFNYNVLRKATSDFSQENVIGKGGCNEVYRGILEDGKGIAVKILKSSSKEAMTNFVHEINIISSLSHQNISPLLGVCVQDNELISVYNLSNTGSLEETLHGKQKGKYVLSWEERFKIAIGLAEALDYLHNRCSKPVIHRDVKTSNVLLSLELQPQVICQILVCRCGDRQHLLDIRYKVMWWEHLDILHRSTSCMEKSVIKLMFTPLEWFCLNSFLEEILFHLRILEDKRVW

SEQ ID NO: 108240 - protein, 180 aa, Arabidopsis thaliana
  peptide (1)..(180): Ceres Seq. ID no. 13653582
MTNFVHEINIISSLSHQNISPLLGVCVQDNELISVYNLSNTGSLEETLHGKQKGKYVLSWEERFKIAIGLAEALDYLHNRCSKPVIHRDVKTSNVLLSLELQPQVICQILVCRCGDRQHLLDIRYKVMWWEHLDILHRSTSCMEKSVIKLMFTPLEWFCLNSFLEEILFHLRILEDKRVW

SEQ ID NO: 108241 - DNA, 1727 bp, Arabidopsis thaliana
  misc_feature (1)..(1727): Ceres Seq. ID no. 13653602
  misc_feature (1)..(1727): Ortholog of  Ceres SEQ ID NO 13596034 as cited in SEQ ID NO 62066
gccaccagaaaaagaaacaatttgacagattcattcattagaagaagaagacaacaatccatcttcttctccccattcctcgtttcaattttgcagatctcgtctccttctcgatttattattaatatagagatggcaagttcaaaggggtctcagaatcatagaaatctgggatgcaatgggaaacaagctttactgcctccgaaaagtccgtttacgggtggtccaacgtttagtgcagattttgttccaagtagtgtgattggatccaaggctgttcagaagcttggagaaggaaatgccaatcatcatcgaacttcatctgagagttttcttattgaggaacagccttcttggcttgacgatcttctcaacgaacctgaaacacctgtacggaaaggagggcatcgacggtcatcgagtgattcatttgcatatgtagatgttcctgttggttttgatgttgattacacgctttgggatggtggtagatataataacaataatggtttctctaatcacgttagaggtcccaaggagtctgattaccttagaagccagcctgttcctttctacccttcagctcatttgtccaaacagaaaataagaccgtgggattcattaccagattccggtgctcgcccgaacagtagttctggttgtttggagagtagctctatcacaagatcagggtcttctggtagcctacgtgatacagaaaaggcttattctgctgctgatagcaagaaagatttcataaataatttcgcaaagtcgtcattcgaaaaacgggataatcctctggctaagtctgctacttccgaggctgatacgaaacgtgctagacagcagtttgcacagcgctctcgagtccgtaaaattcagtacatagctgaactggaaaggaacgttcagatgttacaagtatagggttctgaagtgtctgcggagcttgagtttctcaatcagcagaatctaattctcagcttggagaacaagtcccttaagaatcggttggaaagcttagcacaagagcagcttataaagtacttagaacatgatgtattggagaaagagattgtgaggctaagggctttataccagcttcaacagcagcaagagccgcagcagcaacatcagacaaaaaagcaaggatcatctagccaccagcgttcgaagagtagagatctagagacgcaattcacgaatctgtccttgaggccttaacagttcaaagttcctgccgaaaatagttttatgcttatggctagagcttgagctgtcttcatggttccaggccagcttcttgtgtgtctttccctatcgcattagtagctgctcagtttgtgcttatgcttcttagtttattttcatctttgttgacccggtttgacatctcgatgagcaagtgccagcgattgatgggaaaacggcataaatgaaacaacgagttcgctggaggcggtttggtctgtctctgcgcacatcagggctctcaaatctcgggctgtgtctcgcttgtattgtgtgtctgaagagaatgttccctgtaaaacgtgtagtggtgtaagctttgtatcaactgtcgtttgtcttgctcatctgtttgtgtaaccaaattctcatcatttatcagaaacttgaacaccttaagaaatattttggttctgatgtaacgatagcaaatttaacgtttgaaactactaataaaatgttgaccgttcttc

SEQ ID NO: 108242 - protein, 309 aa, Arabidopsis thaliana
  peptide (1)..(309): Ceres Seq. ID no. 13653603
ATRKRNNLTDSFIRRRRQQSIFFSPFLVSILQISSPSRFIINIEMASSKGSQNHRNLGCNGKQALLPPKSPFTGGPTFSADFVPSSVIGSKAVQKLGEGNANHHRTSSESFLIEEQPSWLDDLLNEPETPVRKGGHRRSSSDSFAYVDVPVGFDVDYTLWDGGRYNNNNGFSNHVRGPKESDYLRSQPVPFYPSAHLSKQKIRPWDSLPDSGARPNSSSGCLESSSITRSGSSGSLRDTEKAYSAADSKKDFINNFAKSSFEKRDNPLAKSATSEADTKRARQQFAQRSRVRKIQYIAELERNVQMLQV

SEQ ID NO: 108243 - protein, 265 aa, Arabidopsis thaliana
  peptide (1)..(265): Ceres Seq. ID no. 13653604
MASSKGSQNHRNLGCNGKQALLPPKSPFTGGPTFSADFVPSSVIGSKAVQKLGEGNANHHRTSSESFLIEEQPSWLDDLLNEPETPVRKGGHRRSSSDSFAYVDVPVGFDVDYTLWDGGRYNNNNGFSNHVRGPKESDYLRSQPVPFYPSAHLSKQKIRPWDSLPDSGARPNSSSGCLESSSITRSGSSGSLRDTEKAYSAADSKKDFINNFAKSSFEKRDNPLAKSATSEADTKRARQQFAQRSRVRKIQYIAELERNVQMLQV

SEQ ID NO: 108244 - DNA, 1125 bp, Arabidopsis thaliana
  misc_feature (1)..(1125): Ceres Seq. ID no. 13653617
  misc_feature (1)..(1125): Ortholog of  Ceres SEQ ID NO 14303542 as cited in SEQ ID NO 63539
  misc_feature (1)..(1125): Ortholog of  Ceres SEQ ID NO 12407937 as cited in SEQ ID NO 0
atggcgtcttgtttacaagcatccatgaattctctgcttccacgctcttcttctttttctcctcatcctcctctatcttcgaattcatccgggagaagaaacttgaagacttttcgttacgcctttcgcgccaaagcctctgccaaaatccctatgcctccgataaatccaaaggatcctttcctctccacgctcgcttctattgccgcgaattctccggaaaagcttctcaatcggccggttaacgctgatgtgccgccatatcttgacatctttgactcccctcagctcatgtcttctcctgcacaggttgaaagatcagtggcttataacgagcaccgaccgagaactcctccaccagacttgccatctatgcttcttgacgggagaattgtttacattggaatgcctcttgtgccggcagtgactgagctagttgtcgctgagctaatgtatcttcagtggctggatcccaaggaacccatttacatttacatcaactccacagggaccactcgtgatgatggagagacggttggaatggaatcagaagggtttgcgatctatgactctttgatgcaacttaaaaacgaggtacatacagtatgtgtgggagcagccataggtcaggcctgtctattactttctgcgggaaccaagggtaaacggtttatgatgccacatgccaaagcgatgattcagcaaccacgtgtaccttcttctgggttgatgcctgccagtgatgtcctgattcgggccaaagaggtcattacaaatagggatatacttgtggaactactatcaaagcatactgggaattccgtggagactgtagctaacgtaatgagaaggccatattacatggatgcaccaaaagctaaagaatttggagtcattgacaggattctttggcgcggtcaagaaaagattattgcggacgtggttccttcagaggaattcgacaagaatgcagggattaaaagcgtagtatgagtctagtcttaagttttcttggcctaaatcatactgcgtcatggagaagaacaaatagactgaccaaaatcacattggccgcagactgccttgtttcaaatcacttggtaaatgtgaacatgcgattaggag

SEQ ID NO: 108245 - protein, 330 aa, Arabidopsis thaliana; identical to SEQ ID NO: 46533
  peptide (1)..(330): Ceres Seq. ID no. 13653618

SEQ ID NO: 108246 - protein, 322 aa, Arabidopsis thaliana; identical to SEQ ID NO: 46534
  peptide (1)..(322): Ceres Seq. ID no. 13653619

SEQ ID NO: 108247 - protein, 279 aa, Arabidopsis thaliana
  peptide (1)..(279): Ceres Seq. ID no. 13653620
MPPINPKDPFLSTLASIAANSPEKLLNRPVNADVPPYLDIFDSPQLMSSPAQVERSVAYNEHRPRTPPPDLPSMLLDGRIVYIGMPLVPAVTELVVAELMYLQWLDPKEPIYIYINSTGTTRDDGETVGMESEGFAIYDSLMQLKNEVHTVCVGAAIGQACLLLSAGTKGKRFMMPHAKAMIQQPRVPSSGLMPASDVLIRAKEVITNRDILVELLSKHTGNSVETVANVMRRPYYMDAPKAKEFGVIDRILWRGQEKIIADVVPSEEFDKNAGIKSVV

SEQ ID NO: 108248 - DNA, 1660 bp, Arabidopsis thaliana
  misc_feature (1)..(1660): Ceres Seq. ID no. 13653621
  misc_feature (1)..(1660): Ortholog of  Ceres SEQ ID NO 14310841 as cited in SEQ ID NO 53666
  misc_feature (1)..(1660): Ortholog of  Ceres SEQ ID NO 15178736 as cited in SEQ ID NO 56439
atgccgatcgataagatcttcaaagatgatgctagtgaagagaagggagaacgtgcgaggatggcatcatttgttggtgcaatggctatcagtgatctggttaagtctactttagggccaaagggcatggataaaatcttgcaatctactggtagaggtcatgcggtcactgttactaacgatggtgctactattctcaagtcacttcacatagacaaccctgcagctaaagttcttgttgacatctcgaaagttcaagatgatgaggttggtgatggaactacctctgttgttgtcttggccggcgagcttctgagggaagcagaaaagcttgtggcttctaagattcaccctatgaccatcatagcaggttacagaatggcttcggaatgtgctcgtaatgctttactgaaaagagtcattgataacaaggacaatgcagagaagtttaggtcagacttgttgaagattgcgatgactactttatgttccaaaattctctcacaggacaaggaacattttgcagaaatggccgtggatgctgttttcaggctaaagggaagcacaaacttggaagctattcagatcatcaaaaaacctggagggtctctgaaggattcgtttttggatgaagggtttattcttgacaagaaaataggaattgggcagcctaagcgcatagagaatgcaaatatcttagtagctaatactgctatggataccgataaagtgaagatttacggtgcacgtgtccgtgtggattccatgaccaaggttgctgagattgaaggggctgagaaggaaaaaatgaaagacaaggtgaagaagatcataggccacggaatcaactgctttgttaacaggcagttgatctacaatttccctgaggaactctttgctgatgctggtatacttgctattgagcatgctgactttgagggaatagagcgtcttggtttggttactggtggtgaaattgcttcgacctttgacaacccagagtctgttaagcttgggcattgcaagcttatagaagaaatcatgattggtgaagacaagttgattcatttctctggttgtgaaatgggccaggcttgttcaattgtcctaagaggggccagtcaccatgtcctagatgaggctgaaagatcactccatgatgccttatgtgtactctctcaaacagtgaatgatactagagttttgcttggaggtggatggccagagatggtgatggcaaaggaagtagatgagcttgcaaggaaaactgctggcaaaaaatctcatgccattgaagctttctcacgtgctctagttgctataccgacaacaatcgctgacaacgctggtttagacagtgccgaattggttgctcagcttcgtgcagagcaccacactgaagggtgtaacgctgggatcgacgtcatcactggagctgtaggagatatggaagagagaggaatctatgaagcattcaaagtgaagcaagcggttctgctttcagccacagaagcatctgagatgatattgcgagtggatgaaatcattacatgtgctcctaggaggagagaagacaggatgtgaaaaactcaacacaaacacatgaacgtggtgggagcctagagattccatgattgtgttttcgatttggaagggtggg

SEQ ID NO: 108249 - protein, 527 aa, Arabidopsis thaliana; identical to SEQ ID NO: 29071
  peptide (1)..(527): Ceres Seq. ID no. 13653622

SEQ ID NO: 108250 - protein, 507 aa, Arabidopsis thaliana; identical to SEQ ID NO: 29072
  peptide (1)..(507): Ceres Seq. ID no. 13653623

SEQ ID NO: 108251 - protein, 500 aa, Arabidopsis thaliana; identical to SEQ ID NO: 29073
  peptide (1)..(500): Ceres Seq. ID no. 13653624

SEQ ID NO: 108252 - DNA, 2486 bp, Arabidopsis thaliana
  misc_feature (1)..(2486): Ceres Seq. ID no. 13653652
  misc_feature (1)..(2486): Ortholog of  Ceres SEQ ID NO 13599779 as cited in SEQ ID NO 0
atctctctctatctcttctccgctcacagcgaatctctctctctctctctctctctctctcttctccggtgtattccgttctccgggaatttctccgaagagggagagaggaaaaaaaaaacgtccgattcaatctcttcgttgctcgacgaatttttcttaagctttccttattgggagctgcaggtgactcatcgaaatgcagtgaaatgagtgttgatgagaagagacagcttgtttatgaactgtcgaagcaatcacatctagctgctgaggtcttgcaggcatggagccgccaagagattctacagatcttatgcgcagaaatgggaaaagaaaggaagtatactggtttgaccaaagtcaagatcatcgagacccttttgaaaattgtatctgagaaaaactctggagagtgtgaagggaagaagagagattctgattgtttgcctattcagagaaacactaagagacaaaggaaggttgataatccttctcggtatgtgattccagcaaccaacattgtaacaagcaacaatgcctcagggagctgcagctcggttaatactaaaggtgagagtactaccatctactgcaaaaatttggcttgtcgtgctgtactgagacaggaagactcgttttgcagaaggtgttcatgttgcatctgtcgtaagtatgatgataacaaagatcctagtctctggttaacatgtagctcagatcctccatttgagggtgagtcttgcggattctcgtgtcatcttgaatgtgctttcaacactgaaaaatccggtcttggaaaagacaagcaaagtgagggatgctgcttctattgtgtctcttgcggtaaagcaaacagtttgcttgaatgctggaagaagcaattgacgattgctaaagaaaccagaagggtagaagtgctttgttaccgtcttttcttagtccagaaactattgaagagctcaactaaataccgaaatctgtgtgaggttgtggatgaagctgtcaagactcttgaagctgatgtgggtcctctcactggtcttcctatgaaaatgggtagaggaattgtaaacagacttcattcgggacccgatgtgcagaaactttgctcttctgctcttgaatctcttgaaactatagcaactacacctcctgatgttgctgcattaccttcacctcgcagctccaagatgcagcaagatacagcaaccacaggatcaaccaagatcaggttcgaggatgtaaacgcgacttcacttacagtggttctcgcctctaatgaaattccctcacctccaaacatcgttcactacagtatttggcatcgtaaggtaccagaaaaagattacccggagaaatcgacttgcacattgtttattccaaacacaagatttgttgtctctggattagctccagcttctgagtactgcttcaaagttgtgtcctatagtggaaccagagaaatgggcgttgatgaaatcaatgttttgacacgtagcgctgaagaaggagcgaattgctcttcggcagtggaaagaagcgtaagccctctcacaaattgcagcacattgtcttctaatccttcttctgttgaagctgagtccaacaacgattacattgtcccaaagaagccatcttcaaagaacgaagacaacaattctccttcagtcgatgaaagtgctgcgaaaaggatgaagaggacaaccgactcagacattgtacagattgagaaggacgttgagcagattgtgttgttggatgatgaagaacaagaagctgttctggataagacggaatctgaaactccagtcgtggttactacgaaaagtcttgttggtaatcgaaacagttcagatgcgagtttgccaattactcccttcaggtcagatgaaatcaagaaccgtcaagctagaatcgaaatatcgatgaaagacaactgtaacaacggtgatcattcagcgaatggaggaacagaaagtggattagagcattgtgtgaagatcataagacaactcgagtgttcaggacatatcgataagaatttcagacagaagtttctgacttggtatagcttgagagcaacgtcacaagagattagagttgtgaagatattcattgatacatttattgatgatcccatggctttggctgagcagctcattgatactttcgacgaccgtgtttcgataaagcgttctgcggttggtggtagcggtgcgtctgcagttgttccatctggattctgtatgaagttgtggcattagagaatgggaacttgtgctctgtttttttcaagtcattttcaaaacgttattctaattattgggaaatttgcattattggaacatttccatgcaagaacagtagtactgttgctatcgaatagatcgtctttgtcggattatttatttatttttagtggatttgattccatttataatttagtaattagtcctagactgaattattcttatttcgttgac

SEQ ID NO: 108253 - protein, 754 aa, Arabidopsis thaliana
  peptide (1)..(754): Ceres Seq. ID no. 13653653
LSLSLLRSQRISLSLSLSLSSPVYSVLREFLRRGREEKKNVRFNLFVARRIFLKLSLLGAAGDSSKCSEMSVDEKRQLVYELSKQSHLAAEVLQAWSRQEILQILCAEMGKERKYTGLTKVKIIETLLKIVSEKNSGECEGKKRDSDCLPIQRNTKRQRKVDNPSRYVIPATNIVTSNNASGSCSSVNTKGESTTIYCKNLACRAVLRQEDSFCRRCSCCICRKYDDNKDPSLWLTCSSDPPFEGESCGFSCHLECAFNTEKSGLGKDKQSEGCCFYCVSCGKANSLLECWKKQLTIAKETRRVEVLCYRLFLVQKLLKSSTKYRNLCEVVDEAVKTLEADVGPLTGLPMKMGRGIVNRLHSGPDVQKLCSSALESLETIATTPPDVAALPSPRSSKMQQDTATTGSTKIRFEDVNATSLTVVLASNEIPSPPNIVHYSIWHRKVPEKDYPEKSTCTLFIPNTRFVVSGLAPASEYCFKVVSYSGTREMGVDEINVLTRSAEEGANCSSAVERSVSPLTNCSTLSSNPSSVEAESNNDYIVPKKPSSKNEDNNSPSVDESAAKRMKRTTDSDIVQIEKDVEQIVLLDDEEQEAVLDKTESETPVVVTTKSLVGNRNSSDASLPITPFRSDEIKNRQARIEISMKDNCNNGDHSANGGTESGLEHCVKIIRQLECSGHIDKNFRQKFLTWYSLRATSQEIRVVKIFIDTFIDDPMALAEQLIDTFDDRVSIKRSAVGGSGASAVVPSGFCMKLWH

SEQ ID NO: 108254 - protein, 685 aa, Arabidopsis thaliana
  peptide (1)..(685): Ceres Seq. ID no. 13653654
MSVDEKRQLVYELSKQSHLAAEVLQAWSRQEILQILCAEMGKERKYTGLTKVKIIETLLKIVSEKNSGECEGKKRDSDCLPIQRNTKRQRKVDNPSRYVIPATNIVTSNNASGSCSSVNTKGESTTIYCKNLACRAVLRQEDSFCRRCSCCICRKYDDNKDPSLWLTCSSDPPFEGESCGFSCHLECAFNTEKSGLGKDKQSEGCCFYCVSCGKANSLLECWKKQLTIAKETRRVEVLCYRLFLVQKLLKSSTKYRNLCEVVDEAVKTLEADVGPLTGLPMKMGRGIVNRLHSGPDVQKLCSSALESLETIATTPPDVAALPSPRSSKMQQDTATTGSTKIRFEDVNATSLTVVLASNEIPSPPNIVHYSIWHRKVPEKDYPEKSTCTLFIPNTRFVVSGLAPASEYCFKVVSYSGTREMGVDEINVLTRSAEEGANCSSAVERSVSPLTNCSTLSSNPSSVEAESNNDYIVPKKPSSKNEDNNSPSVDESAAKRMKRTTDSDIVQIEKDVEQIVLLDDEEQEAVLDKTESETPVVVTTKSLVGNRNSSDASLPITPFRSDEIKNRQARIEISMKDNCNNGDHSANGGTESGLEHCVKIIRQLECSGHIDKNFRQKFLTWYSLRATSQEIRVVKIFIDTFIDDPMALAEQLIDTFDDRVSIKRSAVGGSGASAVVPSGFCMKLWH

SEQ ID NO: 108255 - protein, 646 aa, Arabidopsis thaliana
  peptide (1)..(646): Ceres Seq. ID no. 13653655
MGKERKYTGLTKVKIIETLLKIVSEKNSGECEGKKRDSDCLPIQRNTKRQRKVDNPSRYVIPATNIVTSNNASGSCSSVNTKGESTTIYCKNLACRAVLRQEDSFCRRCSCCICRKYDDNKDPSLWLTCSSDPPFEGESCGFSCHLECAFNTEKSGLGKDKQSEGCCFYCVSCGKANSLLECWKKQLTIAKETRRVEVLCYRLFLVQKLLKSSTKYRNLCEVVDEAVKTLEADVGPLTGLPMKMGRGIVNRLHSGPDVQKLCSSALESLETIATTPPDVAALPSPRSSKMQQDTATTGSTKIRFEDVNATSLTVVLASNEIPSPPNIVHYSIWHRKVPEKDYPEKSTCTLFIPNTRFVVSGLAPASEYCFKVVSYSGTREMGVDEINVLTRSAEEGANCSSAVERSVSPLTNCSTLSSNPSSVEAESNNDYIVPKKPSSKNEDNNSPSVDESAAKRMKRTTDSDIVQIEKDVEQIVLLDDEEQEAVLDKTESETPVVVTTKSLVGNRNSSDASLPITPFRSDEIKNRQARIEISMKDNCNNGDHSANGGTESGLEHCVKIIRQLECSGHIDKNFRQKFLTWYSLRATSQEIRVVKIFIDTFIDDPMALAEQLIDTFDDRVSIKRSAVGGSGASAVVPSGFCMKLWH

SEQ ID NO: 108256 - DNA, 1104 bp, Arabidopsis thaliana
  misc_feature (1)..(1104): Ceres Seq. ID no. 13653684
  misc_feature (1)..(1104): Ortholog of  Ceres SEQ ID NO 15169005 as cited in SEQ ID NO 55180
aaaaaaaatccccccccccccccccgaagaaacagccaacggattagggatcttaccgttctgcgattcgccgagtttgaagctttttttagagacttcaatggtgagccaaggaatggtatctcttacaaagtctctatgcactatgactccaagagtccgtctcaagaatccgaatatgttgcagaaactaaagactggatcttgtaatttccgtttcagaaatctccgtgtcttatgcacaccaaagctgtctcagtgggaaccgtcacctttcattcatgcttctgcagaagaagctgctgatatagtattggacaaaaccgcgaatgtgttagaatctattgtctccgagagtgcagaggaagagaaagtagatatgtcagcgcaacaacgaactaattctcaagttcagattgcattttcaatcttggagcaacccttttcctcttaatggctgattcttgcgcacgtcctaaagacccatcacagtcctgcaacagcaaaccaccatttagctataagttctggaacatgttttcactcataatcgggtttctagtcccaatgttacttctcttcggatcccaatctggccttctcgcttctctccagccccagattcctttcctctcgtccgctgttatcctcttcccgtacttcattctccttgctgttcagacattaacagagatcctcacatggcactggcaatcaccggtctggctagtcacaccagttgtctacgaggcttaccgaatcttgcaactgatgagagggttgacacttagtgcagaggtcaacgcaccggtttgggtggttcatatgcttcgtgggcttgtctcttggtgggtattgatcttgggaatgcaactcatgagagttgcttggtttgctggttttgcatctagaacaacaacaggtcagcaaccacaatctgttgcttctaagtaaagacagataaatgtttcttcgtttagtttttaaagtcatgtcaaagatttgtaactctttcttcactgtatagcttttattattcgtgggttggtgataaggattaaaaaaaaacacatattctttatgatcatattcgctcttttagtc

SEQ ID NO: 108257 - protein, 166 aa, Arabidopsis thaliana
  peptide (1)..(166): Ceres Seq. ID no. 13653685
MADSCARPKDPSQSCNSKPPFSYKFWNMFSLIIGFLVPMLLLFGSQSGLLASLQPQIPFLSSAVILFPYFILLAVQTLTEILTWHWQSPVWLVTPVVYEAYRILQLMRGLTLSAEVNAPVWVVHMLRGLVSWWVLILGMQLMRVAWFAGFASRTTTGQQPQSVASK

SEQ ID NO: 108258 - protein, 150 aa, Arabidopsis thaliana
  peptide (1)..(150): Ceres Seq. ID no. 13653686
KKIPPPPPEETANGLGILPFCDSPSLKLFLETSMVSQGMVSLTKSLCTMTPRVRLKNPNMLQKLKTGSCNFRFRNLRVLCTPKLSQWEPSPFIHASAEEAADIVLDKTANVLESIVSESAEEEKVDMSAQQRTNSQVQIAFSILEQPFSS

SEQ ID NO: 108259 - protein, 139 aa, Arabidopsis thaliana
  peptide (1)..(139): Ceres Seq. ID no. 13653687
MFSLIIGFLVPMLLLFGSQSGLLASLQPQIPFLSSAVILFPYFILLAVQTLTEILTWHWQSPVWLVTPVVYEAYRILQLMRGLTLSAEVNAPVWVVHMLRGLVSWWVLILGMQLMRVAWFAGFASRTTTGQQPQSVASK

SEQ ID NO: 108260 - protein, 117 aa, Arabidopsis thaliana
  peptide (1)..(117): Ceres Seq. ID no. 13653688
MVSQGMVSLTKSLCTMTPRVRLKNPNMLQKLKTGSCNFRFRNLRVLCTPKLSQWEPSPFIHASAEEAADIVLDKTANVLESIVSESAEEEKVDMSAQQRTNSQVQIAFSILEQPFSS

SEQ ID NO: 108261 - DNA, 650 bp, Arabidopsis thaliana
  misc_feature (1)..(650): Ceres Seq. ID no. 13653716
  misc_feature (1)..(650): Ortholog of  Ceres SEQ ID NO 15179206 as cited in SEQ ID NO 0
ctcagatctcttgttcgttttgatgtacaatggcgtccttggtagcagctcctatctctttctcaggtgactctcatgtcaaagcacaccgaaacttcaatgcgattcgcaagagctctacattgactgttcaaacaaaatcaaaccgcagtcacaaactctcggtttctgcaggttaccgtgggggaagtaagggtggtggaagtagtgattttgttaccggttttcttctaggaagtgctgtgttcggaactctggcttatatctttgctccacagatccgaagatcagtgctgagcgagaatgaatatggtttcaagaaaccggagcagccgatgtactatgacgaaggcctagaggagagaagagagatattgaatgagaaaatcggccaactcaattccgccattgacaaggtttcgtcgcgtctgaaaggaggtcgaagcggtagcagcaagaacacttcttcgccgtctgtcccagttgaaaccgacgcagaagcagaagctactgcatgattgaatgtaatgctctgctccattttaccaattcaaaactgccttccattggttctgtggtttttttgttggaactattcctaggggcttttctgacttttagatattgaaagaaaaagacaatcgtcgtat

SEQ ID NO: 108262 - protein, 162 aa, Arabidopsis thaliana; identical to SEQ ID NO: 28061
  peptide (1)..(162): Ceres Seq. ID no. 13653717

SEQ ID NO: 108263 - DNA, 1027 bp, Arabidopsis thaliana
  misc_feature (1)..(1027): Ceres Seq. ID no. 13653718
  misc_feature (1)..(1027): Ortholog of  Ceres SEQ ID NO 12617080 as cited in SEQ ID NO 63943
  misc_feature (1)..(1027): Ortholog of  Ceres SEQ ID NO 13657621 as cited in SEQ ID NO 65802
ctttttttcttctctcataatcgtctcttaatgatgatgataaagcttgagagaagtgattagtctgtagaagaagaagagttaaaaccattcaccaaagaagaaattgagaactagagacagtcatggagatcaaatcttaccaaaatcaagcagagtattttgttgaacactatttattagcagatccatttcttccatatacttctgttcttgttggaatctgtctttgcaaattggtatatgatcttacggagttattcagctcaattcatgtcaaatcatactcagctctcacaaaaataaagagaattgaatggaacaacaggggaatttctacagtccatgcgatctttatctcattcatggcattatactttgcgttcttctctgatttgttttctgaccaaagaagccttgaaacccttacggtgtttcgtaactcgcctctgtctacctttggtttaggagtatcagttggttactttcttgcggatcttggaatgatcttttggttatacccttctttaggaggatcagaatatatattacatcactgcttatctggaacagcagtagcgtattctttgttctctggagaggctcagctttacacatacatggttttaatctctgaagtgactacaccagagatcaatcttagatggtaccttgacattgctggtttgaaacgatctaaagcttatcttgttaatggagttgctatattctttgcttggttgacagcaagaattcttctgttcatctacatgttttaccatgtctacacacattatgatcaggtgatagagatgcatacattcggttatctactggtatttgttgtaccgatttcattgagtgtcatgaacttgatctggtttggtaagatagtgaagggattgaagaaaactcttgagaaaagacagtgaagaaagagttgtgtttttttttttatgtaaatataaaactcttatgaagaatcttacaagtttataagcaacaaagatatggtttgtttctaact

SEQ ID NO: 108264 - protein, 268 aa, Arabidopsis thaliana; identical to SEQ ID NO: 101212
  peptide (1)..(268): Ceres Seq. ID no. 13653719

SEQ ID NO: 108265 - protein, 188 aa, Arabidopsis thaliana; identical to SEQ ID NO: 101213
  peptide (1)..(188): Ceres Seq. ID no. 13653720

SEQ ID NO: 108266 - protein, 142 aa, Arabidopsis thaliana; identical to SEQ ID NO: 101214
  peptide (1)..(142): Ceres Seq. ID no. 13653721

SEQ ID NO: 108267 - DNA, 1226 bp, Arabidopsis thaliana
  misc_feature (1)..(1226): Ceres Seq. ID no. 13653726
  misc_feature (1)..(1226): Ortholog of  Ceres SEQ ID NO 13598818 as cited in SEQ ID NO 0
gatcttcaaaagtgtctcactttttctaacctcgcctccaaagattcttccttttccgattccgatgaaaaggaattttgggttttaggaaagttcgattggttggtttggaaacatctccctaacacacgcagcaaacactttcgttgtttacggagacagtcactttttgtatatatggattcgaatcaatcgatgcggctcctcagtgcttggattggtcaaattggtgatcttggtcttaatttgctatggcgttttatacacattgttgtgagcttatggtacattgtctctggcatatttgaggcaatagaaagctatgccataacgttaggattgaataaaaagtacggttccatcgatcttgagaaactccggtgtctagctgttgtagtggacatcgaagcagctcaagatgttgccaatgttgttgagcttttgcaatggctaaccaccattggggttaaacaagttggtctatttgactctcaaggtttattgaagaaatccaaggatttgatccttgaaaccgttccaggttccatgttgttagaggagattgaaaaggatgttgcgcctgacggaaagcgcattgcattagaattcatttcatcttcagacaataaagaagctgttatgaaagcagccaacatacttcttcagagatacttgaaatccagccatcctgaggacgacaaaggggaagacttttttacagagtctcatttgaatgacgcattaagagttgttggtgagaatgtgcatgtacccgatctgttactggtttatggacctataaggagccacctcggtttccctgcttggagacttcgatacactgagatagtacatatgggaactttgaagtatatgagatatggttcccttttgaaggcaattcacaagttcacaggagtccaccaaaactatggaacttaacggtgactagagagcagagtttcagagatcgatttttggtttgtgattcacatatttgcaatgaattctaaaggagagattattggagagcttttgagtcagtgcagccactactgttcccaatttccggcaattctatgtaccaaagcaacatatgcattggcattgtataggattaagtagtaacaagctggacctaaccaatccggtttttccataaagttccggtttgcttggttatcgtgtgtaaacaaaaatagaacacaactttcagatttttcagt

SEQ ID NO: 108268 - protein, 313 aa, Arabidopsis thaliana
  peptide (1)..(313): Ceres Seq. ID no. 13653727
DLQKCLTFSNLASKDSSFSDSDEKEFWVLGKFDWLVWKHLPNTRSKHFRCLRRQSLFVYMDSNQSMRLLSAWIGQIGDLGLNLLWRFIHIVVSLWYIVSGIFEAIESYAITLGLNKKYGSIDLEKLRCLAVVVDIEAAQDVANVVELLQWLTTIGVKQVGLFDSQGLLKKSKDLILETVPGSMLLEEIEKDVAPDGKRIALEFISSSDNKEAVMKAANILLQRYLKSSHPEDDKGEDFFTESHLNDALRVVGENVHVPDLLLVYGPIRSHLGFPAWRLRYTEIVHMGTLKYMRYGSLLKAIHKFTGVHQNYGT

SEQ ID NO: 108269 - protein, 254 aa, Arabidopsis thaliana
  peptide (1)..(254): Ceres Seq. ID no. 13653728
MDSNQSMRLLSAWIGQIGDLGLNLLWRFIHIVVSLWYIVSGIFEAIESYAITLGLNKKYGSIDLEKLRCLAVVVDIEAAQDVANVVELLQWLTTIGVKQVGLFDSQGLLKKSKDLILETVPGSMLLEEIEKDVAPDGKRIALEFISSSDNKEAVMKAANILLQRYLKSSHPEDDKGEDFFTESHLNDALRVVGENVHVPDLLLVYGPIRSHLGFPAWRLRYTEIVHMGTLKYMRYGSLLKAIHKFTGVHQNYGT

SEQ ID NO: 108270 - protein, 248 aa, Arabidopsis thaliana
  peptide (1)..(248): Ceres Seq. ID no. 13653729
MRLLSAWIGQIGDLGLNLLWRFIHIVVSLWYIVSGIFEAIESYAITLGLNKKYGSIDLEKLRCLAVVVDIEAAQDVANVVELLQWLTTIGVKQVGLFDSQGLLKKSKDLILETVPGSMLLEEIEKDVAPDGKRIALEFISSSDNKEAVMKAANILLQRYLKSSHPEDDKGEDFFTESHLNDALRVVGENVHVPDLLLVYGPIRSHLGFPAWRLRYTEIVHMGTLKYMRYGSLLKAIHKFTGVHQNYGT

SEQ ID NO: 108271 - DNA, 595 bp, Arabidopsis thaliana
  misc_feature (1)..(595): Ceres Seq. ID no. 13653730
  misc_feature (1)..(595): Ortholog of  Ceres SEQ ID NO 15179191 as cited in SEQ ID NO 0
aaaaaaaaaaaaaaaaaaaaaaaaaaaaaaaatggtaattctcagcaacgtctcgttgttctcctgctgcaacatctctcagaaaccatctctcttttctccgtcttctcgtagttctcattgtcccattcgttgctcacagtcacaggaagggaaagaagtggttaccagtcctttgagaagtgtggtttggtcattaggagaagaggtttcaaagagaagtctatttgcacttgtctctgcttctctcttctttgttgatcctgctcttgcttttaagggtggaggtccctatggtcaaggagtcaccaggggacaggacttatctggcaaagatttcagtggccagactcttatcaggcaggacttcaaaacgtccatcctaaggcaagccaacttcaagggtgcaaagttgttaggtgctagcttctttgatgcagatctaacaggtgctgatttatcggaagctgatctccgaggtgcagatttctccttggcaaatgtaacaaaggtgaatctaacgaacgctaacttagaaggagcgactgttactggaaacacatcattcaagggatcaaacattacaggcgcaggt

SEQ ID NO: 108272 - protein, 198 aa, Arabidopsis thaliana
  peptide (1)..(198): Ceres Seq. ID no. 13653731
KKKKKKKKKKMVILSNVSLFSCCNISQKPSLFSPSSRSSHCPIRCSQSQEGKEVVTSPLRSVVWSLGEEVSKRSLFALVSASLFFVDPALAFKGGGPYGQGVTRGQDLSGKDFSGQTLIRQDFKTSILRQANFKGAKLLGASFFDADLTGADLSEADLRGADFSLANVTKVNLTNANLEGATVTGNTSFKGSNITGAG

SEQ ID NO: 108273 - protein, 188 aa, Arabidopsis thaliana
  peptide (1)..(188): Ceres Seq. ID no. 13653732
MVILSNVSLFSCCNISQKPSLFSPSSRSSHCPIRCSQSQEGKEVVTSPLRSVVWSLGEEVSKRSLFALVSASLFFVDPALAFKGGGPYGQGVTRGQDLSGKDFSGQTLIRQDFKTSILRQANFKGAKLLGASFFDADLTGADLSEADLRGADFSLANVTKVNLTNANLEGATVTGNTSFKGSNITGAG

SEQ ID NO: 108274 - DNA, 3350 bp, Arabidopsis thaliana
  misc_feature (1)..(3350): Ceres Seq. ID no. 13653739
  misc_feature (1)..(3350): Ortholog of  Ceres SEQ ID NO 14315338 as cited in SEQ ID NO 60283
atctctctctctctctgcgcctccctttttgcttctctctctctcttcttcttcttccttgtgctctgctctctgtcaatctctctctgtctccttttttacttcgccattggagaaaagagaaatcactttcaacttctccttagattttccgcttatctaagacaacaacgaagttccgagtattcctcaaaaaaattcctcctttatcatttcttcacttccccaaattttgtgtgttttcgtggagcagagtgagattggcgttttgggaagacgaaagttaagcccttttttgctggattggttcagcggttgagaaagcggagatcttgagggctgcttgctttcttcgatttctcgagattttggttttggtatggttgttgagagtgtaatttgaatgtcctccacttcaagggtttcgtttccgccatgaccaccaagcgagcctataagcttcaggaatttgtggcacattctgctgctgtcaattgtcttaagatcggaaggaagtcttctagggttctggtaacaggtggtgaagatcacaaggtcaatctttgggctattggtaagcccaatgccattctgagcttgtatgggcactcaagtggaattgattcagtgacgtttgatgcttcggaggtcttagttgcagcaggagctgctagtggtactatcaaactttgggatttagaggaggcaaagattgtcaggactctcactggtcacaggtccaattgcatctcagtggatttccacccttttggtgagttttttgcgtcaggctcactagacacaaatcttaagatatgggatatacgaaaaaagggctgcatccatacttacaagggtcacacgcgaggagtcaatgtactcagattcaccccagatggtcgctgggttgtatctggaggagaggacaacattgttaaggtttgggatttaacagctggaaaactgctgaccgagtttaagagtcatgaagggcaaattcaaagcctagattttcatcctcatgaattcctactggcaacaggttcagctgatagaactgtaaaattctgggatctggaaacattcgagctgattggttctggtggacctgagactgccggggtccgttgcctgagtttcaatccagatggaaagactgtgctttgtggattgcaagaaagtctcaagattttctcatgggagccaattagatgtcatgatggagtggatgttggatggtcaagattgtcagatatgaatgttcacgagggaaagcttcttggttgctcatacaatcagagttgtgtaggcgtgtgggttgtagatctctcgcgtactgagccatgtatggctggagacactgcgcaatcaaatggtcatccagagaaacgatcttgctcaggaagagatccagtagttctcaatgataataactcaaagacagttctcgggaagctgtccgtttcccaaaatgtagatcctttattgaaggaaacaaagtctctaggaagattatctgtttctcagaactctgatccttcgacaaaagaaacaaagtccattggaaggtcatcaacatcacaaaattcagagtcctcgatgaaggaatcaaagcctctcgggaggttgtcagtttctcaaaattcagacgtttctaaagagtcaaggacgttttcatccacaggaagtttaccaggcactcctcatagggtcagttcgaccaatgtatcaaaagccacttcgggtgtttcaacagccgtctctaatgctgcaacgtcaaggaggaattttacaaaagctaacccaaaggcgaatcctgtcaataaggcagcagattttgctccggtgattgtccccagagcagaccctagaatagagcaggctactgaatccagagcagaacttgacataattgcaagaaccatgccgtattcattgcaggcggctgattcccgaaggtcacctagcagcagaaataaccctgatctgccagacgcttcggttcttgaaatgtctgagtctcagccagttgaaccaaataatataccagatgggggtacacttcctggtggaaaggttggcatgcggggtgcaactgagcgaagcattaatgattttagatacaagagatatggcaggagtaattcaaggtcacggatggggtcacctccacgaaaccacgatgaaaactatgacttggtaagccacagatcaaatagagacccaagccccactgaaagtcagaaaggaggaagattccagtcactcgtcataaatagggagaggagaggaagattttcaaacttcgagggtcctgtttcaaatttttcaagtggaaatatgcctgctccaaacatccgcccttcaaatatgttcaagcagagagggaaccatatgccagttgaacaagggatcgattctccttctgaagaaaatattgttgaagacataatgggaaagcacaatcaatttgtcagctctatgcagtctcgtttggctaagttacaggtagttcgtagatattgggaaaggaatgatgtaaaaaattcgataggctcgatagagaagatggctgataatgctgttactgcggacgtactgggtataataaccgagagaaatgagattttgacactggataattgtacctcccttcttccccttctaacagctcttttagggagcggcatggatcagcatttgagcgtttccctggatttgctgctgaagcttgtcagactgtatgggtcaccaatttactcatcactgtcagctccagcatctgttggtgtagatatcgaggctgagcaaaggatcgagcgctacagccgttgctttgtagagctagagaaagtcaaagcatgccttccctctctagcaagaagaggaggtttggtggccaagtctgtgctcgaactcaacctagcatttcaggaagtttcatcataataactatgagtcttacaaccctggacaaaaacgcagagcaaaagcccgtcttcctcgtggaagaacctgcatcatcccaagtccccaaccatctgctttttgatgtggatttggttccaaagggagtctaacaaaaactaaaggctgatacttactaagttaaccaaaagagttggaaggcaaaaatcctcccaagttagctgcttctggtcactaatctttgtctgcattgttctaattttggtgtgtagtagagagggacagagagaaagagagagagccattgggctgtgtattgttcttatgagagtactgcttgagtttctactcgtctgaaagagacatgttcagtgttctctcgaaacatgaatagaggtttttcgcggtttcttggatttctt

SEQ ID NO: 108275 - protein, 837 aa, Arabidopsis thaliana [sequence omitted]

SEQ ID NO: 108276 - protein, 564 aa, Arabidopsis thaliana
  peptide (1)..(564): Ceres Seq. ID no. 13653741
MNVHEGKLLGCSYNQSCVGVWVVDLSRTEPCMAGDTAQSNGHPEKRSCSGRDPVVLNDNNSKTVLGKLSVSQNVDPLLKETKSLGRLSVSQNSDPSTKETKSIGRSSTSQNSESSMKESKPLGRLSVSQNSDVSKESRTFSSTGSLPGTPHRVSSTNVSKATSGVSTAVSNAATSRRNFTKANPKANPVNKAADFAPVIVPRADPRIEQATESRAELDIIARTMPYSLQAADSRRSPSSRNNPDLPDASVLEMSESQPVEPNNIPDGGTLPGGKVGMRGATERSINDFRYKRYGRSNSRSRMGSPPRNHDENYDLVSHRSNRDPSPTESQKGGRFQSLVINRERRGRFSNFEGPVSNFSSGNMPAPNIRPSNMFKQRGNHMPVEQGIDSPSEENIVEDIMGKHNQFVSSMQSRLAKLQVVRRYWERNDVKNSIGSIEKMADNAVTADVLGIITERNEILTLDNCTSLLPLLTALLGSGMDQHLSVSLDLLLKLVRLYGSPIYSSLSAPASVGVDIEAEQRIERYSRCFVELEKVKACLPSLARRGGLVAKSVLELNLAFQEVSS

SEQ ID NO: 108277 - protein, 533 aa, Arabidopsis thaliana
  peptide (1)..(533): Ceres Seq. ID no. 13653742
MAGDTAQSNGHPEKRSCSGRDPVVLNDNNSKTVLGKLSVSQNVDPLLKETKSLGRLSVSQNSDPSTKETKSIGRSSTSQNSESSMKESKPLGRLSVSQNSDVSKESRTFSSTGSLPGTPHRVSSTNVSKATSGVSTAVSNAATSRRNFTKANPKANPVNKAADFAPVIVPRADPRIEQATESRAELDIIARTMPYSLQAADSRRSPSSRNNPDLPDASVLEMSESQPVEPNNIPDGGTLPGGKVGMRGATERSINDFRYKRYGRSNSRSRMGSPPRNHDENYDLVSHRSNRDPSPTESQKGGRFQSLVINRERRGRFSNFEGPVSNFSSGNMPAPNIRPSNMFKQRGNHMPVEQGIDSPSEENIVEDIMGKHNQFVSSMQSRLAKLQVVRRYWERNDVKNSIGSIEKMADNAVTADVLGIITERNEILTLDNCTSLLPLLTALLGSGMDQHLSVSLDLLLKLVRLYGSPIYSSLSAPASVGVDIEAEQRIERYSRCFVELEKVKACLPSLARRGGLVAKSVLELNLAFQEVSS

SEQ ID NO: 108278 - DNA, 1540 bp, Arabidopsis thaliana
  misc_feature (1)..(1540): Ceres Seq. ID no. 13653743
  misc_feature (1)..(1540): Ortholog of  Ceres SEQ ID NO 14305540 as cited in SEQ ID NO 60089
gagaaatcaaaataccatcttttatcttcttcttcttcttcttcttctttctttttcatacctgcaatttccctgagagactgatcactgatgtgctttcgttctctcgtgacaacaatcttcaatcaatcgagttcactttttagttcgtgactccctaatttcacacgatcaaagatctcgccaccgaaacgctttcaccgaaggattctttcaacggcggcgaaggagatgattacacgacggagaaggatgcgcggaagactatggccaagagagggatagtgaaattaacgaccagttggcagattcgtaggctttaaaactacaattcgactgcggaggaagaagacaaatttgtgtttcatcgatcgatcgataatcatcaccagcgagaaccaagagaccttttcaaatccaaaacagaggaatataagagattaaggaaccattgtgacgatgcctaacttgctccacaccaatcaatctcacttcttcttcctccatcatccgccaatctacaccgtcagttcaaagacgcaggctttccacttcccgcaatcaatggcgccggtcaacctccgtacgaatctctccgtgcgcaggaccgtacggtgtatggcgaacccgaggagagttaagatggtggctaagcagataatgagagaactctccgacatgcttctaacagacacggttttacaacacgctgtcttacctgaagctgcacttggagctgaccgctacctctcttctctcaccaccattagcgatgttgaagtctctaatgatttgcaggtggttaaagtatatgtatccgtgtttggagatgatagagggaaagacgttgcaattgcggggttgaaatcgaaagctaagtacgttaggagtgagcttgggaagcgaatgaagttgagattgacgcctgaggtcaggtttattgaggatgaagccatggaaagaggaagcagggtaattgcaatactggacaaaataaaagctgagaaaggaagcggtgaagggaaaacagaaccatctgactcaacagaagatgatcaagattgggaagtggatgaccccgacgaagacataatctatgtaaagtaatggtctgaagccgtttaagcaacgagtgcatattactctgatagaacgctccgcgttgttggacaagactaaggcggaatggagaaccggagaagatgaataccgatggtagttactcattatgaagcctgaaagcttctttggtccattactcggggatctctccaacaaattgttattttggataatatcagtgtaagggtttggtcatgagctcaagtttctgcctcgttgtttcaatgttttgtccttgtttggtgttacagttaatgtcagctctcacaatgactcaagtagaaattaaccgattcggtttcatatatgcctagatgagttgtgtacttgtgtcattgggcccgtatctcatgtatgcagtaacattttaggcccaaacaaaaatcagaacctaatccattgtttatgttacttatac

SEQ ID NO: 108279 - protein, 215 aa, Arabidopsis thaliana
  peptide (1)..(215): Ceres Seq. ID no. 13653744
MPNLLHTNQSHFFFLHHPPIYTVSSKTQAFHFPQSMAPVNLRTNLSVRRTVRCMANPRRVKMVAKQIMRELSDMLLTDTVLQHAVLPEAALGADRYLSSLTTISDVEVSNDLQVVKVYVSVFGDDRGKDVAIAGLKSKAKYVRSELGKRMKLRLTPEVRFIEDEAMERGSRVIAILDKIKAEKGSGEGKTEPSDSTEDDQDWEVDDPDEDIIYVK

SEQ ID NO: 108280 - protein, 180 aa, Arabidopsis thaliana; identical to SEQ ID NO: 47567
  peptide (1)..(180): Ceres Seq. ID no. 13653745

SEQ ID NO: 108281 - protein, 162 aa, Arabidopsis thaliana; identical to SEQ ID NO: 47568
  peptide (1)..(162): Ceres Seq. ID no. 13653746

SEQ ID NO: 108282 - DNA, 2019 bp, Arabidopsis thaliana
  misc_feature (1)..(2019): Ceres Seq. ID no. 13653751
  misc_feature (1)..(2019): Ortholog of  Ceres SEQ ID NO 15169199 as cited in SEQ ID NO 55297
  misc_feature (1)..(2019): Ortholog of  Ceres SEQ ID NO 15171197 as cited in SEQ ID NO 56892
  misc_feature (1)..(2019): Ortholog of  Ceres SEQ ID NO 14306381 as cited in SEQ ID NO 58812
actaaagtaaaatcaagaaaaagctcctgagtactactggaaacaaaaaagcagagaacaagagaaaaaaaaaagaagaagacgactttatctttttctgggttttgttgttcttctttgactttatgggttcttttgttttagatttaggctcctacagatctgcttaaatctctgtgatcttgtctcttaattcttctgtttacccgtaatttccggaggattctcttcttgcttttccctgagcttctggatttggtcagagaagccttaagttcaaaaggatttggcttttgaagattggtgttaattaagcttctgggttttcatcagtttgtctaaaagtgagtggagtctctcatcttagtctgaagctcttttttttggatttgagcatttctggtttgagaagaatcttgtggaaaccaaagagaaatgtcgtttcgaggcattgttcaagatttgagagatgggtttgggagcttgtcaaggaggagtttcgattttaggctctcgagtcttcataaagggaaagctcagggttcttcgttccgtgagtattcgtcatcccgtgatctcttgtcgcctgtgatagttcagacaagtagatgggctaatcttcctccagagttactctttgatgtgatcaaaagattagaggaaagtgagagtaattggcctgcaagaaaacatgttgtggcttgtgcttcggtttgtcggtcttggagagctatgtgccaagagattgttttggggcctgaaatctgtgggaaactcactttccctgtttccctcaaacagggcctcgtgatgcaatgattcagtgtttcatcaaaagggataaatcaaagctaacatttcacctttttctttgtttaagtcccggtaagctgtttttaggacttagcctgcttctttatgatgttacttagtttatgtctaaatcaagttgaataatgttttttcagctctattagtggagaatgggaaatttcttctttcagctaaaagaactcgtagaactactcgaaccgagtacattatctccatggatgctgataacatctcaagatccagcaactcttacctcggaaagctcagatcaaacttccttgggacaaagttcttggtgtacgacacgcaaccaccaccaaacacatcttcgagcgcacttatcactgatcgaacaagccgaagcaggtttcactccagacgagtttctcctaaagtaccatccggaagctacaacattgctcaaatcacctatgagctcaacgtgttgggcacacgcgggccacgacgaatgcactgcatcatgaactccatcccaatttcatcgctcgaaccaggcggttcagtccctaaccaacccgagaaactcgtccctgcaccatactctctcgacgactcattccgcagtaacatctccttctccaaatcatcatttgaccaccgctccctcgatttcagcagttctagattctccgaaatgggaatatcctgcgacgacaacgaagaagaagcgagtttcagaccgttgattctaaagaacaagcagccaaggtggcacgagcagttgcaatgctggtgtttgaatttccgcggacgtgtgacagttgcatcggttaagaatttccagcttgtagcagcaagacagccgcagcctcaagggacaggtgcagcagcagcaccaacaagtgcacctgctcaccctgagcaagacaaggtgattctccagtttggtaaagtagggaaagatatgttcacaatggactataggtatccattatcggcgtttcaggcgtttgcgatatgcttaagcagctttgacaccaagcttgcttgtgaatagaagaaaccactcgtctccttgatcattcatgctaatcccttgtctctctctctcttttatctatgcttttggttttttttaggcaaatcaaaatttgtctcaatactcagttgctgtactgtgagagtcagacgtctactattaacatcctcttctctattctaaat

SEQ ID NO: 108283 - protein, 267 aa, Arabidopsis thaliana
  peptide (1)..(267): Ceres Seq. ID no. 13653752
MDADNISRSSNSYLGKLRSNFLGTKFLVYDTQPPPNTSSSALITDRTSRSRFHSRRVSPKVPSGSYNIAQITYELNVLGTRGPRRMHCIMNSIPISSLEPGGSVPNQPEKLVPAPYSLDDSFRSNISFSKSSFDHRSLDFSSSRFSEMGISCDDNEEEASFRPLILKNKQPRWHEQLQCWCLNFRGRVTVASVKNFQLVAARQPQPQGTGAAAAPTSAPAHPEQDKVILQFGKVGKDMFTMDYRYPLSAFQAFAICLSSFDTKLACE

SEQ ID NO: 108284 - protein, 182 aa, Arabidopsis thaliana
  peptide (1)..(182): Ceres Seq. ID no. 13653753
MHCIMNSIPISSLEPGGSVPNQPEKLVPAPYSLDDSFRSNISFSKSSFDHRSLDFSSSRFSEMGISCDDNEEEASFRPLILKNKQPRWHEQLQCWCLNFRGRVTVASVKNFQLVAARQPQPQGTGAAAAPTSAPAHPEQDKVILQFGKVGKDMFTMDYRYPLSAFQAFAICLSSFDTKLACE

SEQ ID NO: 108285 - protein, 178 aa, Arabidopsis thaliana
  peptide (1)..(178): Ceres Seq. ID no. 13653754
MNSIPISSLEPGGSVPNQPEKLVPAPYSLDDSFRSNISFSKSSFDHRSLDFSSSRFSEMGISCDDNEEEASFRPLILKNKQPRWHEQLQCWCLNFRGRVTVASVKNFQLVAARQPQPQGTGAAAAPTSAPAHPEQDKVILQFGKVGKDMFTMDYRYPLSAFQAFAICLSSFDTKLACE

SEQ ID NO: 108286 - DNA, 2042 bp, Arabidopsis thaliana
  misc_feature (1)..(2042): Ceres Seq. ID no. 13653755
  misc_feature (1)..(2042): Ortholog of  Ceres SEQ ID NO 15169603 as cited in SEQ ID NO 65772
  misc_feature (1)..(2042): Ortholog of  Ceres SEQ ID NO 14308003 as cited in SEQ ID NO 65919
  misc_feature (1)..(2042): Ortholog of  Ceres SEQ ID NO 14303087 as cited in SEQ ID NO 66569
attgctctctcttctctttgtcacaatgaatttcaattcttcttacaatctcactttcaatgacgttttcttctcttcttcttcctccagtgaccctctggtttcacggaggctgtttctcttgagagatgttcagattcttgagctccttattgcaattttcgtctttgtcgcaatacatgccttgcgtcagaagaaataccaaggtcttcccgtgtggccgtttcttgggatgcttccttctctagcttttggcctcagaggaaacatatacgagtggctatccgatgttctatgtctccagaacggaactttccaattcagaggtccctggtttagcagcctcaacagcactatcacttgtgacccaagaaacgttgagcatctccttaagaaccggttttctgtcttccctaaaggttcttactttcgagacaatctccgagacctcctaggagatggaatattcaacgcggatgatgaaacttggcagaggcagaggaaaacagcgagcattgagtttcattcagccaaattcagacaattaaccactcaatctttgtttgagctcgtgcacaagaggctcttacctgttcttgagacatcggttaagagctcatctcctatcgatctacaagacgtcttgttgaggctaacgtttgataacgtatgtatgattgcttttggagtcgatccaggatgtctcggtccagatcaaccagtgattccttttgcgaaagcctttgaggatgcgactgaagctgcggttgtgagattcgtcatgcctacttgcgtgtggaagttcatgaggtatcttgatataggaacagagaagaagcttaaggaatcaataaagggtgtggatgatttcgctgatgaagttatcaggacgaggaagaaagaactgtctcttgagggcgaaactacaaaaagatcggatctcttaactgtgtttatgggtctgagagatgagaagggagagagtttttcagacaagtttcttcgtgatatctgtgtgaacttcatacttgctgggagagatacttcttctgtggctttgagctggtttttctggttgctagagaagaacccagaggtcgaagagaagatcatggtggagatgtgtaagattctgaggcagagagatgaccatggaaatgcagagaagagtgattatgaacctgtgtttggaccagaagagatcaagaagatggattatctacaagctgctttgtctgaagctcttagattgtatccttcagttcccgtggatcacaaagaggttcaagaagacgacgtatttcctgatggaactatgttgaagaagggagacaaagttatatacgcgatttacgcaatgggtcgtatggaagctatttggggaaaagactgtcttgagtttaggccagagaggtggctaagagacggacggttcatgagtgagtcggcctacaaattcacagcctttaacggtggtccacgcctttgtcttggcaaagattttgcctattatcagatgaaatctacggcggccgcaatagtttatcggtacaaggtgaaggtggtgaatggtcacaaggtggagccgaagttggcactcacaatgtacatgaaacatggtttgatggtgaacttgatcaataggagtgtctccgagatagatcaatactatgccaagtcttttgatgagggttatattaattagtgtttttaatgttttgaagatttgttaattgattaagttaatggtctaagaagattgtgtgcttacttttagttgatttgaatttttaaagtatgttttttgtgtccactttgttattagatgatgtgtacagtctatgggttatgtgtacgtggaaatgtggaggaagttgaatgggttatatatacttatatgtggaccgattatgggttgttgttaggaaattagttggtggggcttgtaatttgataataaattaattacttggaattttaattttagtttctatcagttttggttagcacttttggaattcaatttggaaacgaactttttt

SEQ ID NO: 108287 - protein, 567 aa, Arabidopsis thaliana
  peptide (1)..(567): Ceres Seq. ID no. 13653756
LLSLLFVTMNFNSSYNLTFNDVFFSSSSSSDPLVSRRLFLLRDVQILELLIAIFVFVAIHALRQKKYQGLPVWPFLGMLPSLAFGLRGNIYEWLSDVLCLQNGTFQFRGPWFSSLNSTITCDPRNVEHLLKNRFSVFPKGSYFRDNLRDLLGDGIFNADDETWQRQRKTASIEFHSAKFRQLTTQSLFELVHKRLLPVLETSVKSSSPIDLQDVLLRLTFDNVCMIAFGVDPGCLGPDQPVIPFAKAFEDATEAAVVRFVMPTCVWKFMRYLDIGTEKKLKESIKGVDDFADEVIRTRKKELSLEGETTKRSDLLTVFMGLRDEKGESFSDKFLRDICVNFILAGRDTSSVALSWFFWLLEKNPEVEEKIMVEMCKILRQRDDHGNAEKSDYEPVFGPEEIKKMDYLQAALSEALRLYPSVPVDHKEVQEDDVFPDGTMLKKGDKVIYAIYAMGRMEAIWGKDCLEFRPERWLRDGRFMSESAYKFTAFNGGPRLCLGKDFAYYQMKSTAAAIVYRYKVKVVNGHKVEPKLALTMYMKHGLMVNLINRSVSEIDQYYAKSFDEGYIN

SEQ ID NO: 108288 - protein, 559 aa, Arabidopsis thaliana; identical to SEQ ID NO: 82609
  peptide (1)..(559): Ceres Seq. ID no. 13653757

SEQ ID NO: 108289 - protein, 490 aa, Arabidopsis thaliana; identical to SEQ ID NO: 82610
  peptide (1)..(490): Ceres Seq. ID no. 13653758

SEQ ID NO: 108290 - DNA, 802 bp, Arabidopsis thaliana
  misc_feature (1)..(802): Ceres Seq. ID no. 13653759
  misc_feature (1)..(802): Ortholog of  Ceres SEQ ID NO 13661939 as cited in SEQ ID NO 61170
  misc_feature (1)..(802): Ortholog of  Ceres SEQ ID NO 14309041 as cited in SEQ ID NO 0
  misc_feature (1)..(802): Ortholog of  Ceres SEQ ID NO 14309611 as cited in SEQ ID NO 0
aaaaaaaaaaaaaaaaaaaaaacacaaactgtgaatcgttgtttgttaattctctttaaaatcgccagaagaaagagatctccgttttctacagaagaaaagcaagagagtaagaatgggatcggaacaaaacgatagcacaagcttcacgcaatcgcaagcttcagagccaaagctatgtgttaaaggatgtggtttctttggatcaccatcaaacatggatctctgttctaaatgttacagaggcatttgtgctgaggaagctcaaacagcagttgctaaagctgctgttgaaaaatctttcaagccttctcctcctcgtagtctcttcatagcagaacctcctgctgttgttgtggaacccaaacccgaaaaggcggcagttgttgttgtctcggccgagccatcttcctcggcggttcctgaggcgaacgagccatcgagacctgcacgaaccaaccggtgtttgtgttgtaacaagaaggttgggatcatggggtttaagtgcaaatgcgggagcactttctgcggcgaacatcggtacccggagactcatgattgcagctttgatttcaaagaagttggacgtggagagattgccaaagctaatcctgtggttaaggctgataaaattcaaaggttctgaaatatggaagttttttctaagtattttggtggtaattactcatttgtatttgaaccgatttgggggttgtcttggatggttttaatggattgtttccaaagggatagaggatgatgaatttggttccgtaataaagtgaatcgatgaagtttgttc

SEQ ID NO: 108291 - protein, 176 aa, Arabidopsis thaliana; identical to SEQ ID NO: 101884
  peptide (1)..(176): Ceres Seq. ID no. 13653760

SEQ ID NO: 108292 - protein, 142 aa, Arabidopsis thaliana; identical to SEQ ID NO: 101885
  peptide (1)..(142): Ceres Seq. ID no. 13653761

SEQ ID NO: 108293 - DNA, 1055 bp, Arabidopsis thaliana
  misc_feature (1)..(1055): Ceres Seq. ID no. 13653766
  misc_feature (1)..(1055): Ortholog of  Ceres SEQ ID NO 15169372 as cited in SEQ ID NO 58778
atgggaatatatggagtgatgacagggaaaaaaggaaagagtgggtttggatctgcttctactgctgaagatgttactcaagccattgatgccagtcatctcactgccatcatcacaggtggaacaagtgggattggattggaggcagctagagtgttagcaatgagaggagctcatgtcatcattgccgcaagaaacccaaaagctgctaatgagtctaaagagatgattcttcagatgaaccctaatgctcgcgtcgactatctccagatcgatgtctcttccatcaaatcagtcagatccttcgttgatcagtttcttgcccttaatgttcctctcaacattctcataaacaatgcaggtgttatgttttgtcctttcaagctcaccgaagatgggattgaatcacaattcgcaacaaaccacattggtcattttctgttgacgaatctgcttctggacaaaatgaaaagtaccgcaagagaaagtggagtccaaggaaggattgtgaatctgtcatctattgctcatacttatacttactctgaaggtatcaagttccaaggcatcaatgaccctgctggatattcggagagaagggcttatggacagtccaaactctcaaacttgttgcactccaatgcactctctcgtagactacaggaagaaggtgtgaacatcactataaattcggtgcaccctggtcttgtcaccactaatctctttcgctactccggttttagcatgaaggtcttcagggctatgactttcctcttttggaaaaatatacctcagggagcagcaacaacatgctacgttgcacttcatccagatctcgaaggcgtcaccggaaagtatttcggcgactgtaacatcgttgctccgagcaaatttgctaccaacaattctctcgccgataaactttgggatttcagtgtctttctcatcgattctatctctaaataatctatcatcatcaagacaaattcttagacattcaaaatttatttatccttcttgatattgttacattaatgccatatctttttcaccac

SEQ ID NO: 108294 - protein, 321 aa, Arabidopsis thaliana; identical to SEQ ID NO: 102392
  peptide (1)..(321): Ceres Seq. ID no. 13653767

SEQ ID NO: 108295 - protein, 315 aa, Arabidopsis thaliana; identical to SEQ ID NO: 102393
  peptide (1)..(315): Ceres Seq. ID no. 13653768

SEQ ID NO: 108296 - protein, 267 aa, Arabidopsis thaliana
  peptide (1)..(267): Ceres Seq. ID no. 13653769
MRGAHVIIAARNPKAANESKEMILQMNPNARVDYLQIDVSSIKSVRSFVDQFLALNVPLNILINNAGVMFCPFKLTEDGIESQFATNHIGHFLLTNLLLDKMKSTARESGVQGRIVNLSSIAHTYTYSEGIKFQGINDPAGYSERRAYGQSKLSNLLHSNALSRRLQEEGVNITINSVHPGLVTTNLFRYSGFSMKVFRAMTFLFWKNIPQGAATTCYVALHPDLEGVTGKYFGDCNIVAPSKFATNNSLADKLWDFSVFLIDSISK

SEQ ID NO: 108297 - DNA, 1880 bp, Arabidopsis thaliana
  misc_feature (1)..(1880): Ceres Seq. ID no. 13653774
  misc_feature (1)..(1880): Ortholog of  Ceres SEQ ID NO 13594317 as cited in SEQ ID NO 57796
tgaaagaagaaaaaaacagagaagaagaagaaaaaatctatctccgccatgaacgcgagagctcttctttgctcttcaaatattcactctctctacacttcaaatcgtccacctgaaaaaacctcttcttctcgcagcctccgtaatctcaaaccatctccaaagtcgttacgggtatggatctacccgcgaaataggtccagtgttttccgggtattagttcggagctccgacaagagtgaaagcagtaattcgtattacgtagaaggagataaagtaagtggaaacaatgacgtcgtttctgattcgcctagctctatcgtcctcccatggtgggaagagtttccgaagcggtgggtgattgtgttactctgtttctcagcttttcttctctgcaatatggacagagtgaatatgagtatagctatacttccgatgtcagctgagtatggttggaatccagcaacagttggtctgattcagtcttctttcttctggggttaccttcttacacagatagctggtggaatttgggcagacactgtaggagggaaaagggttcttggattcggtgttatttggtggtcaatcgctacaattctcactcctgtagctgctaaactcggtcttccttacttgctcgttgttcgtgctttcatgggagttggagagggtgttgcaatgcctgctatgaataatatattgtcgaagtgggttcctgtgcaagagagaagcagatcactcgcgcttgtttacagcggaatgtaccttggatctgtcaccggtttagccttttcgcctttcttgattcatcaatttggatggccttctgtgttttattctttcgggtctcttggaactgtatggttgactctgtggctaactaaggcagagagttcaccattagaagatccaacattgctccctgaagaaagaaagctaattgcagacaactgtgctagcaaagagccagtgaagtcgatcccgtggaggctgatattgtcgaaaccaccggtttgggctctcatcagttgccacttttgtcacaactggggaacattcattctcttaacatggatgccaacttattaccatcaagtgctgaagttcaaccttatggagtcaggacttctctctgtatttccatggatgacaatggcaatatctgcaaatgccggtggatggattgccgatacacttgtcagccgaggtttctctgtcacgaatgtccgcaagtttctatgatgaaattcagataatgcaaacaatagggtttcttggaccagcgttcttcctaacacagctgaaacacatagattctcctacaatggctgttttgtgcatggcttgtagtcaggggactgatgcgttttcacagtctggtctatactctaaccatcaagacatcgctccaagatactctggagtgttacttggtttgtctaatactgctggagtacttgccggagttcttggcacagctgcgactggtcacatactacaacacggttcttgggatgacgttttcacgatttcggtcggtctttacctcgttgggaccgtcatttggaacctattttcaaccggagagaagataatcgattgatccattccgagaatagtaaatagttcggctccaagacctctcatcaggtgcaacttcacctcacgccagtctctgattatacaagtatcattgcagtctgagagctagccggaatattccttttttgccagaaaattcttcaggatctttctgctcgttgatttaggccaaacgcatatgaataatactttgtagatgaaagatatacagatgattttttgtaaataaacaaagctcacactttctcaagattactcaaaatctctcttcagct

SEQ ID NO: 108298 - protein, 398 aa, Arabidopsis thaliana
  peptide (1)..(398): Ceres Seq. ID no. 13653775
MNARALLCSSNIHSLYTSNRPPEKTSSSRSLRNLKPSPKSLRVWIYPRNRSSVFRVLVRSSDKSESSNSYYVEGDKVSGNNDVVSDSPSSIVLPWWEEFPKRWVIVLLCFSAFLLCNMDRVNMSIAILPMSAEYGWNPATVGLIQSSFFWGYLLTQIAGGIWADTVGGKRVLGFGVIWWSIATILTPVAAKLGLPYLLVVRAFMGVGEGVAMPAMNNILSKWVPVQERSRSLALVYSGMYLGSVTGLAFSPFLIHQFGWPSVFYSFGSLGTVWLTLWLTKAESSPLEDPTLLPEERKLIADNCASKEPVKSIPWRLILSKPPVWALISCHFCHNWGTFILLTWMPTYYHQVLKFNLMESGLLSVFPWMTMAISANAGGWIADTLVSRGFSVTNVRKFL

SEQ ID NO: 108299 - protein, 281 aa, Arabidopsis thaliana
  peptide (1)..(281): Ceres Seq. ID no. 13653776
MDRVNMSIAILPMSAEYGWNPATVGLIQSSFFWGYLLTQIAGGIWADTVGGKRVLGFGVIWWSIATILTPVAAKLGLPYLLVVRAFMGVGEGVAMPAMNNILSKWVPVQERSRSLALVYSGMYLGSVTGLAFSPFLIHQFGWPSVFYSFGSLGTVWLTLWLTKAESSPLEDPTLLPEERKLIADNCASKEPVKSIPWRLILSKPPVWALISCHFCHNWGTFILLTWMPTYYHQVLKFNLMESGLLSVFPWMTMAISANAGGWIADTLVSRGFSVTNVRKFL

SEQ ID NO: 108300 - protein, 276 aa, Arabidopsis thaliana
  peptide (1)..(276): Ceres Seq. ID no. 13653777
MSIAILPMSAEYGWNPATVGLIQSSFFWGYLLTQIAGGIWADTVGGKRVLGFGVIWWSIATILTPVAAKLGLPYLLVVRAFMGVGEGVAMPAMNNILSKWVPVQERSRSLALVYSGMYLGSVTGLAFSPFLIHQFGWPSVFYSFGSLGTVWLTLWLTKAESSPLEDPTLLPEERKLIADNCASKEPVKSIPWRLILSKPPVWALISCHFCHNWGTFILLTWMPTYYHQVLKFNLMESGLLSVFPWMTMAISANAGGWIADTLVSRGFSVTNVRKFL

SEQ ID NO: 108301 - DNA, 1125 bp, Arabidopsis thaliana
  misc_feature (1)..(1125): Ceres Seq. ID no. 13653782
  misc_feature (1)..(1125): Ortholog of  Ceres SEQ ID NO 14302919 as cited in SEQ ID NO 20338
  misc_feature (1)..(1125): Ortholog of  Ceres SEQ ID NO 13595497 as cited in SEQ ID NO 51127
  misc_feature (1)..(1125): Ortholog of  Ceres SEQ ID NO 14314046 as cited in SEQ ID NO 59316
tgcccccagctagtcacatactcatgattgcaaaatctctctctctctctgcctctctatatattaacctttcttcttcctttactttctcatcttctatctctcaaaagaaaagcagacaactttatttgcaaaaacagagtttttttttcttatcttgagaaagttcaacagaagatgatgttcgagaaagacgatctgggtctaagcttaggcttgaattttccaaagaaacagatcaatctcaaatcaaatccatctgtttctgttactccttcttcttcttcttttggattattcagaagatcttcatggaacgagagttttacttcttcagttccaaactcagattcgtcacaaaaagaaacaagaactttcatccgaggaatcgacgtgaacagaccaccgtctacagcggaatacggcgacgaagacgctggagtatcttcacctaacagtacagtctcaagctctacagggaaaagaagcgagagagaagaagacacagatccacaaggctcaagaggaatcagtgacgatgaagatggtgataactccaggaaaaagcttagactttccaaagatcaatctgctattcttgaagagaccttcaaagatcacagtactctcaatccgaagcagaagcaagcattggctaaacaattagggttacgagcaagacaagtggaagtttggtttcagaacagacgagcaagaacaaagctgaagcaaacggaggtagactgcgagttcttacggagatgctgcgagaatctaacggaagagaaccgtcggctacaaaaagaagtaacggaattgagagcacttaagctctctcctcagttctacatgcacatgagcccacccactactttgaccatgtgcccttcatgtgaacacgtgtcggtcccgccaccacaacctcaggctgctacgtcagcgcaccaccggtcgttgccggtcaatgcgtgggctcctgcgacgaggatatctcacggcttgacttttgacgctcttcgtcctaggtcctaagtctttttacttgcaaccaaagggcattttggtcgttttttaagtttcatggaccagatatgcatgtagttgttaacatgtatgtattttctt

SEQ ID NO: 108302 - protein, 284 aa, Arabidopsis thaliana; identical to SEQ ID NO: 37759
  peptide (1)..(284): Ceres Seq. ID no. 13653783

SEQ ID NO: 108303 - protein, 283 aa, Arabidopsis thaliana; identical to SEQ ID NO: 37760
  peptide (1)..(283): Ceres Seq. ID no. 13653784

SEQ ID NO: 108304 - DNA, 770 bp, Arabidopsis thaliana
  misc_feature (1)..(770): Ceres Seq. ID no. 13653792
  misc_feature (1)..(770): Ortholog of  Ceres SEQ ID NO 13580204 as cited in SEQ ID NO 0
ctgaagcgcagcagcagccgtaagaaagaaaccgaggaagaacgatctcagtgagaggacgatcacttcgccgtcgcagtcatgggtcgaatgcatagtagaggtaagggtatctcggcatctgctttgccgtacaagcgttcatctccgagctggctcaagacaacccctcaagatgttgatgagtccatctgcaaatttgcgaagaagggtttgaccccatcgcagattggtgtcattcttcgtgactctcacggaattccacaggtgaaaagtgttactggaagcaagattctcagaattttgaaagctcatggtcttgcacctgagatccctgaggatctgtatcacttgatcaagaaagctgttgctatccgcaagcatcttgagaggaacaggaaagataaggattccaaattcaggctgattcttgtagagagcagaatccatcgtcttgctcgttactacaagaagaccaagaagctcccacccgtctggaagtacgagtctacaactgcaagcactcttgtggcttgagaagaatagagttgatcatgtccttcaagaaggaccatttcattgtctgcattgcaactcaaagctcttcttcttttgaacctatgtatctgttttcgctagttttgatgggttacaacttgctatgagattttgattttagggaacgaatttgtttatgcgaatctttccattatcgttacagcttatctttcaattaacgttaattatcgttctcagagaatttttacaga

SEQ ID NO: 108305 - protein, 151 aa, Arabidopsis thaliana; identical to SEQ ID NO: 29525
  peptide (1)..(151): Ceres Seq. ID no. 13653793

SEQ ID NO: 108306 - protein, 148 aa, Arabidopsis thaliana; identical to SEQ ID NO: 29526
  peptide (1)..(148): Ceres Seq. ID no. 13653794

SEQ ID NO: 108307 - DNA, 508 bp, Arabidopsis thaliana
  misc_feature (1)..(508): Ceres Seq. ID no. 13653819
  misc_feature (1)..(508): Ortholog of  Ceres SEQ ID NO 12562293 as cited in SEQ ID NO 20690
actcatcacttacttaacatactaagagagttattagaacttgcaaaaaatggcttccaaggctttgattctgttaggtctcttctcagttcttctcgtcgtctccgaagtgtctgccgcaaggcaatcgggcatggtgaagccagagagtgaggaaactgtgcaacctgaaggttatggcggtggccacggaggacatggtggtcacggagggggaggaggccacggacatggaggacacaacggaggagggggccacggacttgacggatacggaggaggtggaggacactatggaggaggtggaggacactacggaggtggtggaggaggatacggaggtggaggaggacaccacggaggaggaggccacgggctaaacgaacctgttcagactaagccgggtgtttaaaactatataatatcttcactaccatgcatgattgcatatatatatatacgcttatgtattatctatatgcctataaataaaccatggtgagtttgt

SEQ ID NO: 108308 - protein, 120 aa, Arabidopsis thaliana
  peptide (1)..(120): Ceres Seq. ID no. 13653820
MASKALILLGLFSVLLVVSEVSAARQSGMVKPESEETVQPEGYGGGHGGHGGHGGGGGHGHGGHNGGGGHGLDGYGGGGGHYGGGGGHYGGGGGGYGGGGGHHGGGGHGLNEPVQTKPGV

SEQ ID NO: 108309 - protein, 92 aa, Arabidopsis thaliana
  peptide (1)..(92): Ceres Seq. ID no. 13653821
MVKPESEETVQPEGYGGGHGGHGGHGGGGGHGHGGHNGGGGHGLDGYGGGGGHYGGGGGHYGGGGGGYGGGGGHHGGGGHGLNEPVQTKPGV

SEQ ID NO: 108310 - protein, 67 aa, Arabidopsis thaliana
  peptide (1)..(67): Ceres Seq. ID no. 13653822
MAVATEDMVVTEGEEATDMEDTTEEGATDLTDTEEVEDTMEEVEDTTEVVEEDTEVEEDTTEEEATG

SEQ ID NO: 108311 - DNA, 1776 bp, Arabidopsis thaliana
  misc_feature (1)..(1776): Ceres Seq. ID no. 13653827
  misc_feature (1)..(1776): Ortholog of  Ceres SEQ ID NO 14311001 as cited in SEQ ID NO 53717
  misc_feature (1)..(1776): Ortholog of  Ceres SEQ ID NO 14314945 as cited in SEQ ID NO 58031
  misc_feature (1)..(1776): Ortholog of  Ceres SEQ ID NO 13595833 as cited in SEQ ID NO 59877
  misc_feature (1)..(1776): Ortholog of  Ceres SEQ ID NO 13654452 as cited in SEQ ID NO 65792
  misc_feature (1)..(1776): Ortholog of  Ceres SEQ ID NO 13573778 as cited in SEQ ID NO 0
ttcttcttcttcttcttcttcttcttcttcctcctctctcgtcggatctctctgatttagtgatttttcaaatttcaagttttcttcacctttaattttgtgtctcgttgatctctctttggacattctgctttggattctggaggcttctcattagatctctattagtgggtttaggtcaagttcttgaaatggataaggagaaatctcctgcaccaccacctagtggaggtcttcctccaccatcgggtcgttactctgcgttttcacctaatggaagtagctttgcaatgaaagctgaatcatcttttcctcctttgactccaagtggaagcaatagctcagatgctaaccgattcagccatgatattagccgaatgccggataatccacctaagaacctaggccatcgccgagctcattcagagattcttactcttcctgatgacttaagctttgatagtgatcttggtgtggttggtgctgctgatggaccttctttctctgatgatactgacgaggacttactctatatgtatcttgatatggaaaaattcaattcttctgctacatcgacttctcaaatgggtgagccatcagaaccgacttggaggaatgaattagcctcgacttctaaccttcagagtacacccggtagctctagtgaaagaccgagaattagacaccaacacagccaatcgatggatggttcaacaactatcaagcctgagatgcttatgtcagggaatgaagatgtgtctggagttgactctaagaaagccatctctgctgctaaactttctgagcttgctctcattgatccaaaacgcgccaagaggatatgggcaaacaggcagtctgctgcgaggtcaaaagaaaggaagatgagatacattgcagagctcgagagaaaagtacagactttacaaacagaggccacatctctctcagcccagttgactctcttacagagagatacaaatggcctgggtgttgaaaacaatgagcttaaactgcgagtacaaactatggagcaacaggtccacctacaggatgctttaaatgatgcactaaaggaggaagtccagcatcttaaggtattgacggggcaaggtccatcaaatggtacatcaatgaactacggttcttttggatcaaaccagcaattctatcccaataatcagtcgatgcacactatcttagccgcacaacagttacagcagctccagatccagtcacagaaacagcaacaacaacaacagcaacaccagcaacaacaacagcagcagcagcagcaatttcactttcaacagcagcaactgtaccagcttcagcagcagcaacggcttcaacaacaggaacaacaaagcggggcttcagagctaagaagacccatgccttctcctggtcagaaagagagtgtgacatcgcctgatcgtgaaactcccttgacaaaagactgagtctagactgtgctaatgtccaatttagtaagttactcttggaaaatcttctttttcatcgcaggctcatggatttgggatttactgcattatagagttaaaaacaagacagcttagaagttgcggatttagaagttgttagtgaagcttttgttctcgtctgttggtagtttacaatcttctctttgtatgatcctaagctcttaaaaagttcttggatttggtcatttggttagaaatgggtccttagtccaagtctgtagtcgtttaaccatattcatattctttgccttttgttcattttggttacttg

SEQ ID NO: 108312 - protein, 423 aa, Arabidopsis thaliana; identical to SEQ ID NO: 41604
  peptide (1)..(423): Ceres Seq. ID no. 13653828

SEQ ID NO: 108313 - protein, 390 aa, Arabidopsis thaliana; identical to SEQ ID NO: 41605
  peptide (1)..(390): Ceres Seq. ID no. 13653829

SEQ ID NO: 108314 - protein, 361 aa, Arabidopsis thaliana; identical to SEQ ID NO: 41606
  peptide (1)..(361): Ceres Seq. ID no. 13653830

SEQ ID NO: 108315 - DNA, 1357 bp, Arabidopsis thaliana
  misc_feature (1)..(1357): Ceres Seq. ID no. 13653838
  misc_feature (1)..(1357): Ortholog of  Ceres SEQ ID NO 15177750 as cited in SEQ ID NO 57772
  misc_feature (1)..(1357): Ortholog of  Ceres SEQ ID NO 13596581 as cited in SEQ ID NO 62420
  misc_feature (1)..(1357): Ortholog of  Ceres SEQ ID NO 13591273 as cited in SEQ ID NO 65904
  misc_feature (1)..(1357): Ortholog of  Ceres SEQ ID NO 13623086 as cited in SEQ ID NO 0
aagaccacactactctctctatctctctttctctctatctctctctatctctctcatttcttcctgcgtcaatggcgactcaaggtcaggttatcacttgcaaagctgcggtggcttacgagccgaacaagcctctggtcatcgaagatgtgcaagtggctccacctcaagctggtgaggttcggatcaagatcctctacactgctctttgtcacaccgacgcttacacttggagcggcaaggatcctgaaggtctctttccttgtattctaggtcatgaggctgctgggattgttgagagtgttggtgaaggagtaactgaagttcaagctggagatcatgttatcccttgttatcaagctgagtgtcgtgaatgcaagttttgcaaatctgggaagactaacctttgtggcaaggtgagatctgctactggtgttgggattatgatgaatgaccgtaagtcgaggttctcggttaatgggaaacccatttatcacttcatgggtacttccacgtttagtcagtatactgttgttcatgatgttagcgtcgccaaaattgatcctactgctcctttggataaagtttgccttcttggatgtggtgttcccactggccttggagcagtttggaatactgcaaaagtagaaccagggtcaaatgttgccattttcggtcttggcactgttggacttgctgttgccgagggtgcgaaaacagctggtgcttcaaggatcattggcattgacatcgatagcaagaagtatgaaactgcaaagaagtttggtgttaacgaatttgtgaacccaaaggatcacgacaagccaattcaggaagtgattgtcgatctcactgatggcggtgttgactacagctttgagtgcatcgggaatgtctccgtgatgagagctgcattggagtgctgtcacaagggatggggaacttcggtcatagttggtgttgcagcatcaggacaagagatatcaactcgtccgttccaactcgtgactggccgtgtgtggaaaggaacagcttttggtggtttcaagagtcgaacccaagtgccttggcttgtagaaaagtacatgaacaaggagataaaagtggatgaatacataacacacaacttgaccttgggagaaatcaataaggctttcgatctattgcacgaaggtacttgccttcgttgtgtcctcgataccagcaaatgactatatgggtcctctctgctttaatctatgtgttcttgtgactttcgtcttttatcggtattgacatttcctaagagcaacagactactctactcgtgtgtgtctcgtttctatcttatgcttcaataaaatatcaattaagaccg

SEQ ID NO: 108316 - protein, 402 aa, Arabidopsis thaliana
  peptide (1)..(402): Ceres Seq. ID no. 13653839
DHTTLSISLSLYLSLSLSFLPASMATQGQVITCKAAVAYEPNKPLVIEDVQVAPPQAGEVRIKILYTALCHTDAYTWSGKDPEGLFPCILGHEAAGIVESVGEGVTEVQAGDHVIPCYQAECRECKFCKSGKTNLCGKVRSATGVGIMMNDRKSRFSVNGKPIYHFMGTSTFSQYTVVHDVSVAKIDPTAPLDKVCLLGCGVPTGLGAVWNTAKVEPGSNVAIFGLGTVGLAVAEGAKTAGASRIIGIDIDSKKYETAKKFGVNEFVNPKDHDKPIQEVIVDLTDGGVDYSFECIGNVSVMRAALECCHKGWGTSVIVGVAASGQEISTRPFQLVTGRVWKGTAFGGFKSRTQVPWLVEKYMNKEIKVDEYITHNLTLGEINKAFDLLHEGTCLRCVLDTSK

SEQ ID NO: 108317 - protein, 379 aa, Arabidopsis thaliana; identical to SEQ ID NO: 22337
  peptide (1)..(379): Ceres Seq. ID no. 13653840

SEQ ID NO: 108318 - protein, 255 aa, Arabidopsis thaliana; identical to SEQ ID NO: 22338
  peptide (1)..(255): Ceres Seq. ID no. 13653841

SEQ ID NO: 108319 - DNA, 1436 bp, Arabidopsis thaliana
  misc_feature (1)..(1436): Ceres Seq. ID no. 13653846
  misc_feature (1)..(1436): Ortholog of  Ceres SEQ ID NO 13654557 as cited in SEQ ID NO 68444
gtttacagcaaaaaatcgaaaatggttgcctcagccgccgcacgacctcttgtcaccgtccaaggacttgacggtgacatgagcaccgatcaatccaccaccgtcactttaccagacgtcatgactgctccagttcgacctgacattgtcaacttcgtccacgcccaaatctccaacaacagccgtcagccttacgcagtctccaaaaaggccggtcaccaaacctccgccgagtcctggggaaccggaagagccgtgtcacgtatccctcgtgttcctggtggtggaactcaccgtgccggtcaagcagcgttcggaaacatgtgtcgtggtggtcgtatgtttgctccgactaagatctggagacgctggcaccgtcgtgtcaatgtcaacatgaagaggcacgcgattgtttctgcaatcgctgctactgctgttccagctcttgtgatggctcgtggtcacaagatcgagaatgttcctgagatgcctcttgttgttagcgactcagctgaagctgtggagaagacatcagctgcgatcaaggtattgaagcagatcggtgcttacgacgatgcggagaaagctaagaacagtattggaattcgtcctggtaaaggtaaaatgaggaatcgtcgttacatttctaggaaaggtcctcttgttgtgtttggaactgaaggagccaagattgtgaaagcttttaggaatcttcctggtgttgagctttgtcacgttgagaggcttaacttgttgaaattagcccctggtggtcaccttggtaggtttgtgatttggactaagtctgcttttgagaagcttgaatctatctatggctcgtttgagaaaccatcagagaagaagaagggttacgtcttgcctcgtgcgaagatggtgaatgctgatcttgctaggattattaactccgatgaggtacagagtgtggtgaacccgattaaggatggttccaagagagcggttctgaagaagaatccattgaagaaccttaatgtgatgttcaagttgaatccttatgctaagaccgcaaagagaatgtctctgttggctgaagcttcaagggttaaggctaagaaggagaagctcgagaagaagaggaaagtcgtcactaaggaggaggcccaagcgatcaaagcagcaggcaaggcttggtatcagactatgatttcagacagtgactacaccgagttcgataacttcaccaagtggcttggcgctagtcagtaatgatgctctcgtcatcgcaaagtctcttatatctaggcaaagattttggttttctgatttatgttcttcgtttgtattggatttatctgggattttatgttgttgagttggtaagacgatttttaagaactatgatggtgtttttcaaactcttttcaatctgtttcccttagtgctctttactcgctatt

SEQ ID NO: 108320 - protein, 414 aa, Arabidopsis thaliana
  peptide (1)..(414): Ceres Seq. ID no. 13653847
VYSKKSKMVASAAARPLVTVQGLDGDMSTDQSTTVTLPDVMTAPVRPDIVNFVHAQISNNSRQPYAVSKKAGHQTSAESWGTGRAVSRIPRVPGGGTHRAGQAAFGNMCRGGRMFAPTKIWRRWHRRVNVNMKRHAIVSAIAATAVPALVMARGHKIENVPEMPLVVSDSAEAVEKTSAAIKVLKQIGAYDDAEKAKNSIGIRPGKGKMRNRRYISRKGPLVVFGTEGAKIVKAFRNLPGVELCHVERLNLLKLAPGGHLGRFVIWTKSAFEKLESIYGSFEKPSEKKKGYVLPRAKMVNADLARIINSDEVQSVVNPIKDGSKRAVLKKNPLKNLNVMFKLNPYAKTAKRMSLLAEASRVKAKKEKLEKKRKVVTKEEAQAIKAAGKAWYQTMISDSDYTEFDNFTKWLGASQ

SEQ ID NO: 108321 - protein, 407 aa, Arabidopsis thaliana; identical to SEQ ID NO: 36166
  peptide (1)..(407): Ceres Seq. ID no. 13653848

SEQ ID NO: 108322 - protein, 388 aa, Arabidopsis thaliana; identical to SEQ ID NO: 36167
  peptide (1)..(388): Ceres Seq. ID no. 13653849

SEQ ID NO: 108323 - DNA, 1533 bp, Arabidopsis thaliana
  misc_feature (1)..(1533): Ceres Seq. ID no. 13653871
  misc_feature (1)..(1533): Ortholog of  Ceres SEQ ID NO 14313413 as cited in SEQ ID NO 58766
  misc_feature (1)..(1533): Ortholog of  Ceres SEQ ID NO 15171109 as cited in SEQ ID NO 59576
aactcccgtatttgattctttcttcaagatatcaatcaagatcaagagtaagacagagacacaaaggcgagagctatgtcgtcgtcggtggatttcgtgacggaacaggggagatgcggcgacgatggtaacggcgccggagagacagtaaagaatggcgaaattgatcatttgctttccgaaccgtcggctccgactatttctctccctacggaatctttcctcagagcagcgacgttactcaagaaccaggttgtggaggccacgtggaaaggtggtgtcgaagctcttgcctctggttcgggtccagtgctggatccgactgtgtacacaggactactcggcacagcgttcacctgcttgaagtcgtacgaggtaacgcggaaccatcaagatctgctaacttgcgcagagataatcgacacgtgtgccaacgttgcgcgtgccacaaccaggcacgtgacatttttatgtggaagaggaggagtttgtacgcttggtgcaattgtagccaattacagaggggaccaatcaaagcgtgacttcttcctcggtctttttcttgagcttgcagaagagagagagttaccagcaggaccagaggaaggaggatttgggatgtcatatgaccttctctatggaagagcgggtttcctttgggctgctctgttcctaaaccgatatctcggccaaggaactgttcctgaccatctcttatcacccattgttgcagccatcttagccggtgggcgagttggagctgcagatcatgaagcttgtcctctgttatacaggtttcacggaacgcgattttggggtgctgcgaatggattagctggaatcttgtatgtattgctgcattttccactatcggaagaggatgttaaagatgttcaagggacattgaggtatatgatgagtaataggtttccgaacagcggaaactacccgtgcagcgaagggaatccgagggataagctagtccaatgggctcatggagcaaccggcatggccattactttggctaaagcatctcaggtgtttcccaaggaaagggatttccgcgaagcagccattgaagcaggagaagtagtgtggaagagtggcttggtgaagaaggtaggtttagctgatggagttgctggtaatgcctacgctttcttatccctttatcgcttaaccggagatgttgtatatgaagagagagcaaaagcgtttgcgagttacttgtgccgtgatgcgatagagctcgtgaatatgacaagccaagaaacagaacatgattattcgctattccggggactagctggaccagtatgcctctggttcgatcttgtgtcgccggtagattctaagtttcctggttatgagatataatttaaaaccaggtaaccgtaggttcttttatgactatctctttgtgaaaggatcttaggttctccggtttattccactttctataatctattgaagtaacttgagatttgggagaaacattcatagaaaacaagaataaaagtaacatgaaaagat

SEQ ID NO: 108324 - protein, 433 aa, Arabidopsis thaliana
  peptide (1)..(433): Ceres Seq. ID no. 13653872
MSSSVDFVTEQGRCGDDGNGAGETVKNGEIDHLLSEPSAPTISLPTESFLRAATLLKNQVVEATWKGGVEALASGSGPVLDPTVYTGLLGTAFTCLKSYEVTRNHQDLLTCAEIIDTCANVARATTRHVTFLCGRGGVCTLGAIVANYRGDQSKRDFFLGLFLELAEERELPAGPEEGGFGMSYDLLYGRAGFLWAALFLNRYLGQGTVPDHLLSPIVAAILAGGRVGAADHEACPLLYRFHGTRFWGAANGLAGILYVLLHFPLSEEDVKDVQGTLRYMMSNRFPNSGNYPCSEGNPRDKLVQWAHGATGMAITLAKASQVFPKERDFREAAIEAGEVVWKSGLVKKVGLADGVAGNAYAFLSLYRLTGDVVYEERAKAFASYLCRDAIELVNMTSQETEHDYSLFRGLAGPVCLWFDLVSPVDSKFPGYEI

SEQ ID NO: 108325 - protein, 252 aa, Arabidopsis thaliana; identical to SEQ ID NO: 45429
  peptide (1)..(252): Ceres Seq. ID no. 13653873

SEQ ID NO: 108326 - DNA, 1395 bp, Arabidopsis thaliana
  misc_feature (1)..(1395): Ceres Seq. ID no. 13653874
  misc_feature (1)..(1395): Ortholog of  Ceres SEQ ID NO 12780298 as cited in SEQ ID NO 65880
  misc_feature (1)..(1395): Ortholog of  Ceres SEQ ID NO 13654539 as cited in SEQ ID NO 68015
atggctgctcgtatcgggatcttctccgtcttcgtagctgtattgttatctatttctgcattttcctcagctcaggatctccagatcgtaaatgccgagcgaaggattgatttaagctcacatatcgtgaaggccttcttgactctcaaggttgaaaatattgggaaagatcctgctgcagaaatgcttcttgctttcccacctacccagatcaagaatttggctatggtacaagccctggcaactactggcaagaagaagaagaaaacttatttgccattagatgtaaaaccaactgaacaacctgatgcaccaaatgacactggatactaccgtgttacgtttattagccccttaggtccgggtgaaactgtttcacttgaggtgctttacatattgactcattccttggaacctttcccagtggagataacccagtcagaatctcaattggtttactatcatgatagtgcagtgatattgtcaccgtatcatgttaagcaacagacaacttttattaagactcctagtactagagtagagtcgttcactagcattgaacctgctaaccgggctggcaaagagatcaaatatggaccatatgaaaatcgtgcttcatactcttacacacctgtcatcattcacttcgagaataacagtccatttgctgttgttgaggagcttgtgcgtgaaattgagatttcacactggggtagccttcagattacagaaaattataggttgactcatgggggagcgaggcataagggtgttttctcaagggttgattatcaatctaaacgatcggtcagtggtgcatcctctttcaatgcgctccttgcagtcctacctcccagagtgaactctgtctactacagggatgagataggaaacatctctacttcacatttgcgtacaggctttagaaagtcagaacttgaatttgaaccccgctacccattatttggagggtggagtgcaacttttatcatcggctatagagttccattggaagactatctctttgaagcatctgatggcagacgttacttgaactttacctttgggtgcccgctcgtcgaaactattgttaacaagttgactatcaaagtcgtgcttcctgaaggatcaaaggacccttctgctgttttgccctttacagtcaatcaagagttgcaggtcaaatactcataccttgacattgtgggaagaaccgtggttgtgttgcaaaaagataacgtagttcccactcacaacgtacccttccaggtgtactatacattcaaaccaatatacatgctagcggaaccattcatgcttgtatcggctttcttcttagtatttgtggcttcgcttgcgtatgtacacatcgatctcaatatcgtcaggaagtag

SEQ ID NO: 108327 - protein, 464 aa, Arabidopsis thaliana
  peptide (1)..(464): Ceres Seq. ID no. 13653875
MAARIGIFSVFVAVLLSISAFSSAQDLQIVNAERRIDLSSHIVKAFLTLKVENIGKDPAAEMLLAFPPTQIKNLAMVQALATTGKKKKKTYLPLDVKPTEQPDAPNDTGYYRVTFISPLGPGETVSLEVLYILTHSLEPFPVEITQSESQLVYYHDSAVILSPYHVKQQTTFIKTPSTRVESFTSIEPANRAGKEIKYGPYENRASYSYTPVIIHFENNSPFAVVEELVREIEISHWGSLQITENYRLTHGGARHKGVFSRVDYQSKRSVSGASSFNALLAVLPPRVNSVYYRDEIGNISTSHLRTGFRKSELEFEPRYPLFGGWSATFIIGYRVPLEDYLFEASDGRRYLNFTFGCPLVETIVNKLTIKVVLPEGSKDPSAVLPFTVNQELQVKYSYLDIVGRTVVVLQKDNVVPTHNVPFQVYYTFKPIYMLAEPFMLVSAFFLVFVASLAYVHIDLNIVRK

SEQ ID NO: 108328 - protein, 403 aa, Arabidopsis thaliana
  peptide (1)..(403): Ceres Seq. ID no. 13653876
MLLAFPPTQIKNLAMVQALATTGKKKKKTYLPLDVKPTEQPDAPNDTGYYRVTFISPLGPGETVSLEVLYILTHSLEPFPVEITQSESQLVYYHDSAVILSPYHVKQQTTFIKTPSTRVESFTSIEPANRAGKEIKYGPYENRASYSYTPVIIHFENNSPFAVVEELVREIEISHWGSLQITENYRLTHGGARHKGVFSRVDYQSKRSVSGASSFNALLAVLPPRVNSVYYRDEIGNISTSHLRTGFRKSELEFEPRYPLFGGWSATFIIGYRVPLEDYLFEASDGRRYLNFTFGCPLVETIVNKLTIKVVLPEGSKDPSAVLPFTVNQELQVKYSYLDIVGRTVVVLQKDNVVPTHNVPFQVYYTFKPIYMLAEPFMLVSAFFLVFVASLAYVHIDLNIVRK

SEQ ID NO: 108329 - protein, 389 aa, Arabidopsis thaliana
  peptide (1)..(389): Ceres Seq. ID no. 13653877
MVQALATTGKKKKKTYLPLDVKPTEQPDAPNDTGYYRVTFISPLGPGETVSLEVLYILTHSLEPFPVEITQSESQLVYYHDSAVILSPYHVKQQTTFIKTPSTRVESFTSIEPANRAGKEIKYGPYENRASYSYTPVIIHFENNSPFAVVEELVREIEISHWGSLQITENYRLTHGGARHKGVFSRVDYQSKRSVSGASSFNALLAVLPPRVNSVYYRDEIGNISTSHLRTGFRKSELEFEPRYPLFGGWSATFIIGYRVPLEDYLFEASDGRRYLNFTFGCPLVETIVNKLTIKVVLPEGSKDPSAVLPFTVNQELQVKYSYLDIVGRTVVVLQKDNVVPTHNVPFQVYYTFKPIYMLAEPFMLVSAFFLVFVASLAYVHIDLNIVRK

SEQ ID NO: 108330 - DNA, 1100 bp, Arabidopsis thaliana
  misc_feature (1)..(1100): Ceres Seq. ID no. 13653878
  misc_feature (1)..(1100): Ortholog of  Ceres SEQ ID NO 13590967 as cited in SEQ ID NO 65553
  misc_feature (1)..(1100): Ortholog of  Ceres SEQ ID NO 14309438 as cited in SEQ ID NO 0
aaaggctcttcttcttcttcgtcatcactactactactcctctctaacgttttcctcattcttcttaattccgatttttgagtgatggctatggcctctgcttctggttctgctctttgcttcactgatgcttctagctctcttgctttaagacgcgattgtggagctctttgcttgcctcctaggacagttacgtttggatttgtcgataaacctcttgtcaatctcgagcgattaagattatccactttgaagattagagcatcaaatgctactgctgtggagaatggaaagcaagaaggaagtgctgctgattctgataaagttccaactccagttgttataatcgaccaagattctgaccctgatgcaaccgttcttgaagttacattcggagatcgtcttggagctttacttgacactatgaatgcgctcaaaaacttgggattgaatgtcgtcaaggcaaatgtttaccttgattcttccggcaagcacaacaaatttgccattactagagcagatagtggaagaaaagtagaagaccctgaattgcttgaggccattcgtctcacagtcataaacaatctgcttgagtttcatcctgaatcaagttctcagttggcaatgggagcagcttttggtgttcttcctccaactgaaccgattgacgtggacatagcaacacatataaccattgaagatgatggaccagaccgcagtttactcttcatagaatcagcggatagacctggactattagttgagctggtgaagatcatttcagatatcagcgtcgctgttgaatctggagaattcgacaccgagggtttgttggctaaggtgaagtttcatgtaagctacaggaacaaagccctaatcaagcctctccagcaggtccttgctaatagtctgaggtacttcttgaggcgtccatcaactgacgagtcaagtttctgattatgcccatttttcaaaatctcaagtctcattcctcgtgactactatttttaccacttttttttttttttacatttgaccaaaataagctgcttcatacacctgtaatagtaacattatgcatcattcatccaatttacttt

SEQ ID NO: 108331 - protein, 290 aa, Arabidopsis thaliana; identical to SEQ ID NO: 49145
  peptide (1)..(290): Ceres Seq. ID no. 13653879

SEQ ID NO: 108332 - protein, 288 aa, Arabidopsis thaliana; identical to SEQ ID NO: 49146
  peptide (1)..(288): Ceres Seq. ID no. 13653880

SEQ ID NO: 108333 - protein, 177 aa, Arabidopsis thaliana; identical to SEQ ID NO: 49147
  peptide (1)..(177): Ceres Seq. ID no. 13653881

SEQ ID NO: 108334 - DNA, 1274 bp, Arabidopsis thaliana
  misc_feature (1)..(1274): Ceres Seq. ID no. 13653882
  misc_feature (1)..(1274): Ortholog of  Ceres SEQ ID NO 14302919 as cited in SEQ ID NO 20338
  misc_feature (1)..(1274): Ortholog of  Ceres SEQ ID NO 13595497 as cited in SEQ ID NO 51127
  misc_feature (1)..(1274): Ortholog of  Ceres SEQ ID NO 14306765 as cited in SEQ ID NO 53275
  misc_feature (1)..(1274): Ortholog of  Ceres SEQ ID NO 14314046 as cited in SEQ ID NO 59316
actgctgcacaagtgtagaggcagtggcacaacatctttaagaaagagagagagaaagagtcatttattcatttcctcgcttaaaaatcttgagcacccagacagaattcttctttcttctttctggggttgagaaaaatgagtgaaagagatgatggattggggctaagtttgagcttgagtttaggttttaatcaaaaggacccgtcttcgaggttaaatccaatgcctctggcttcttatgcatcttcatcacacatgcagcatatgcagcagagcaattataaccatcctcaaaagattcagaacacttggattaacatgtttcagtcatcagagagaaactcggacatgagatcgtttctccggggaatagacgtgaacagagctccatcgacggtggtggttgacgtggaggatgaaggcgccggagtttcgtctccgaacagcaccgtctcaagcgtgatgagcgggaagaagagcgagcgagagctaatggctgcggcaggtgcagttggaggaggtagagtagaagataatgagattgagagagcttcttgctcgctcggcggtggtagcgacgatgaagacggtagcgggaacggagatgacagttcgaggaagaaactccgattgtctaaagaacaagctttggttcttgaagaaacttttaaagaacatagtacactcaatccgaagcaaaagatggctttggctaagcaattgaatctgaggacgagacaagttgaagtgtggttccaaaaccgaagggcaaggacgaagctgaagcaaacggaagtagactgtgaatatcttaagagatgttgcgagaatctaacggatgagaatcggagattgcaaaaggaagtgagtgagcttagggctttaaagctttctccacacttatacatgcacatgaaacctcccactactctcacaatgtgtccttcttgcgagcgagtcgctgttacgtcatcttcgtcatcggtggctcctcctgtgatgaattcatcgtctccgatgggtccgatgagtccgtgggctgccatgcctctacggcaacgacctgctgctggttctcattagagtttaattagtctaaagataataggtttggtgatttgtttttattatattgttgaacggacttggaagttcttttcaagagttggtcccatgctcttctttcctttgttttattcagtttctatttatagctgaattctggataatggaaaatctactaatattattgtccaattattagtttgggg

SEQ ID NO: 108335 - protein, 315 aa, Arabidopsis thaliana
  peptide (1)..(315): Ceres Seq. ID no. 13653883
MSERDDGLGLSLSLSLGFNQKDPSSRLNPMPLASYASSSHMQHMQQSNYNHPQKIQNTWINMFQSSERNSDMRSFLRGIDVNRAPSTVVVDVEDEGAGVSSPNSTVSSVMSGKKSERELMAAAGAVGGGRVEDNEIERASCSLGGGSDDEDGSGNGDDSSRKKLRLSKEQALVLEETFKEHSTLNPKQKMALAKQLNLRTRQVEVWFQNRRARTKLKQTEVDCEYLKRCCENLTDENRRLQKEVSELRALKLSPHLYMHMKPPTTLTMCPSCERVAVTSSSSSVAPPVMNSSSPMGPMSPWAAMPLRQRPAAGSH

SEQ ID NO: 108336 - protein, 286 aa, Arabidopsis thaliana
  peptide (1)..(286): Ceres Seq. ID no. 13653884
MPLASYASSSHMQHMQQSNYNHPQKIQNTWINMFQSSERNSDMRSFLRGIDVNRAPSTVVVDVEDEGAGVSSPNSTVSSVMSGKKSERELMAAAGAVGGGRVEDNEIERASCSLGGGSDDEDGSGNGDDSSRKKLRLSKEQALVLEETFKEHSTLNPKQKMALAKQLNLRTRQVEVWFQNRRARTKLKQTEVDCEYLKRCCENLTDENRRLQKEVSELRALKLSPHLYMHMKPPTTLTMCPSCERVAVTSSSSSVAPPVMNSSSPMGPMSPWAAMPLRQRPAAGSH

SEQ ID NO: 108337 - protein, 275 aa, Arabidopsis thaliana
  peptide (1)..(275): Ceres Seq. ID no. 13653885
MQHMQQSNYNHPQKIQNTWINMFQSSERNSDMRSFLRGIDVNRAPSTVVVDVEDEGAGVSSPNSTVSSVMSGKKSERELMAAAGAVGGGRVEDNEIERASCSLGGGSDDEDGSGNGDDSSRKKLRLSKEQALVLEETFKEHSTLNPKQKMALAKQLNLRTRQVEVWFQNRRARTKLKQTEVDCEYLKRCCENLTDENRRLQKEVSELRALKLSPHLYMHMKPPTTLTMCPSCERVAVTSSSSSVAPPVMNSSSPMGPMSPWAAMPLRQRPAAGSH

SEQ ID NO: 108338 - DNA, 1233 bp, Arabidopsis thaliana
  misc_feature (1)..(1233): Ceres Seq. ID no. 13653890
  misc_feature (1)..(1233): Ortholog of  Ceres SEQ ID NO 13594213 as cited in SEQ ID NO 57038
  misc_feature (1)..(1233): Ortholog of  Ceres SEQ ID NO 13654989 as cited in SEQ ID NO 63117
  misc_feature (1)..(1233): Ortholog of  Ceres SEQ ID NO 13584744 as cited in SEQ ID NO 69137
atgggcaactgcggtactagagacgaggctgccgtcttcactcctcaagctcaagcccaacagctccagaagaagcactcccgatccgtctcagatctgagcgatccatccactcctcgcttccgagacgactctcgcactcctatttcgtatgcccaagtcatcccctttactttgtttgagcttgagaccatcaccaagagcttccgcccagattatatactcggagaaggtggtttcggtaccgtctacaagggttacattgatgacaatctccgcgtcggcctcaagtctctccctgttgccgtcaaggtccttaacaaggagggactccagggtcaccgtgaatggcttacagaggtcaacttcctcggccaactccgtcatcccaacctcgtcaagcttattggttactgctgcgaggacgatcaccgattacttgtttatgagttcatgctgcgaggcagtcttgagaatcacctatttcgaaaaaccacagctccgctatcttggtctagaaggatgatgattgctcttggagctgcgaaaggccttgctttcctccacaatgctgaaagaccggttatttatagggatttcaagacttccaatatactgcttgactccgactacaccgccaagctttcagattttggcttagctaaagctggaccccagggtgatgaaacccatgtatcaactcgagttatgggtacttatggctatgctgccccagaatatgtgatgactggacacttgacggccagaagtgatgtatacagctttggagttgttcttctagagatgttgacaggaagaaaatcagtggataagacaagacctagcaaagagcagaacttggttgattgggctcggccaaagctgaatgataaaagaaaactgctgcagataattgacccaagactggagaaccaatactctgtcagggcagctcagaaggcatgcagcttggcgtattattgtcttagccagaacccgaaagctaggccattgatgagcgatgtggttgagactttggaacctttgcagtgtactggtgatgccctgatcccttgtgcaactactacagctggagctgcatttgcaatgggaggggtgcctgattacagaatgcaccggaggtttgcaaagaacgttgggccaggtgcaatttgccggtcacccaatccaaattattcaccgggtggacctgcagcatgcagagttcggtga

SEQ ID NO: 108339 - protein, 410 aa, Arabidopsis thaliana; identical to SEQ ID NO: 107711
  peptide (1)..(410): Ceres Seq. ID no. 13653891

SEQ ID NO: 108340 - protein, 259 aa, Arabidopsis thaliana; identical to SEQ ID NO: 107712
  peptide (1)..(259): Ceres Seq. ID no. 13653892

SEQ ID NO: 108341 - protein, 236 aa, Arabidopsis thaliana; identical to SEQ ID NO: 71405
  peptide (1)..(236): Ceres Seq. ID no. 13653893

SEQ ID NO: 108342 - DNA, 679 bp, Arabidopsis thaliana
  misc_feature (1)..(679): Ceres Seq. ID no. 13653894
  misc_feature (1)..(679): Ortholog of  Ceres SEQ ID NO 15172691 as cited in SEQ ID NO 56148
  misc_feature (1)..(679): Ortholog of  Ceres SEQ ID NO 15226850 as cited in SEQ ID NO 62501
gtcaagaacaaagacgattcgattgaattctccataagaggtccgacccgaattcgaaaacccgtaagaaccgaatcgaagatgagcaaggatggtttgagcaacgaccaagtctcatcaatgaaggaagcattcatgctattcgacacagacggcgacggcaaaatcgcaccgtcggagctcggaatcttaatgcggtcactcggcggcaatccaacagaatcacaactcaaatcaatcataacgacggagaatctctcgtctccgttcgatttcaatcgattcctagatctaatggcgaaacatctgaaaacagagccgttcgatcgccagcttcgtgatgcgttcaaagtgcttgacaaggaaggtactggattcgttgctgtggcagatctgagacatatacttacgagtatcggtgagaaattgcagccgagtgagtttgatgagtggatcaaagaggttgatgttggatctgatggtaagatccggtatgaggattttattgctagaatggttgctaagtaagatctaaatctgtgaaaatttgaattctttagattagaacaaatcttaggatttgttcagaaagtgtttaattgttaatgtaattgggaatttggtcataattaagctgtgttatttgaaaagatggttcctttatgatattgaattctgc

SEQ ID NO: 108343 - protein, 175 aa, Arabidopsis thaliana
  peptide (1)..(175): Ceres Seq. ID no. 13653895
VKNKDDSIEFSIRGPTRIRKPVRTESKMSKDGLSNDQVSSMKEAFMLFDTDGDGKIAPSELGILMRSLGGNPTESQLKSIITTENLSSPFDFNRFLDLMAKHLKTEPFDRQLRDAFKVLDKEGTGFVAVADLRHILTSIGEKLQPSEFDEWIKEVDVGSDGKIRYEDFIARMVAK

SEQ ID NO: 108344 - protein, 148 aa, Arabidopsis thaliana; identical to SEQ ID NO: 98419
  peptide (1)..(148): Ceres Seq. ID no. 13653896

SEQ ID NO: 108345 - protein, 135 aa, Arabidopsis thaliana; identical to SEQ ID NO: 98420
  peptide (1)..(135): Ceres Seq. ID no. 13653897

SEQ ID NO: 108346 - DNA, 2250 bp, Arabidopsis thaliana
  misc_feature (1)..(2250): Ceres Seq. ID no. 13653898
  misc_feature (1)..(2250): Ortholog of  Ceres SEQ ID NO 15174638 as cited in SEQ ID NO 53185
  misc_feature (1)..(2250): Ortholog of  Ceres SEQ ID NO 13657460 as cited in SEQ ID NO 66115
  misc_feature (1)..(2250): Ortholog of  Ceres SEQ ID NO 13659394 as cited in SEQ ID NO 67049
tggtagtagcagtgaaaaacaaaagcaatccaatcccaaacccatttgctcttaagattcttcacatagagaagtcacatgttccttcttcttcttccttcatcatccccaaacacacacaaactaaaaaaaaggcaaaaccctagatccaagatcagacctaatctaatcgaaactcatagctgaaaaatgaagagagatcatcaccaattccaaggtcgattgtccaaccacgggacttcttcttcatcatcatcaatctctaaagataagatgatgatggtgaaaaaagaagaagacggtggaggtaacatggacgacgagcttctcgctgttttaggttacaaagttaggtcatcggagatggcggaggttgctttgaaactcgaacaattagagacgatgatgagtaatgttcaagaagatggtttatctcatctcgcgacggatactgttcattataatccgtcggagctttattcttggcttgataatatgctctctgagcttaatcctcctcctcttccggcgagttctaacggtttagatccggttcttccttcgccggagatttgtggttttccggcttcggattatgaccttaaagtcattcccggaaacgcgatttatcagtttccggcgattgattcttcgtcttcgtcgaataatcagaacaagcgtttgaaatcatgctcgagtcctgattctatggttacatcgacttcgacgggtacgcagattggtggagtcataggaacgacggtgacgacaaccaccacgacaacgacggcggcgggtgagtcaactcgttctgttatcctggttgactcgcaagagaacggtgttcgtttagtccacgcgcttatggcttgtgcagaagcaatccagcagaacaatttgactctagcggaagctcttgtgaagcaaatcggatgcttagctgtgtctcaagccggagctatgagaaaagtggctacttacttcgccgaagctttagcgcggcggatctaccgtctctctccgccgcagaatcagatcgatcattgtctctccgatactcttcagatgcacttttacgagacttgtccttatcttaaattcgctcacttcacggcgaaccaagcgattctcgaagcttttgaaggtaagaagagagtacacgtcattgatttctcgatgaaccaaggtcttcaatggcctgcacttatgcaagctcttgcgcttcgagaaggaggtcctccaactttccggttaaccggaattggtccaccggcgccggataattctgatcatcttcatgaagttggttgtaaattagctcagcttgcggaggcgattcacgtagaattcgaataccgtggattcgttgctaacagcttagccgatctcgatgcttcgatgcttgagcttagaccgagcgatacggaagctgttgcggtgaactctgtttttgagctacataagctcttaggtcgtcccggtgggatagagaaagttctcggcgttgtgaaacagattaaaccggtgattttcacggtggttgagcaagaatcgaaccataacggaccggttttcttagaccggtttactgaatcgttacattattattcgactctgtttgattcgttggaaggagttccgaatagtcaagacaaagtcatgtctgaagtttacttagggaaacagatttgtaatctggtggcttgtgaaggtcctgacagagtcgagagacacgaaacgttgagtcaatggggaaaccggtttggttcgtccggtttagcgccggcacatcttgggtctaacgcgtttaagcaagcgagtatgcttttgtctgtgtttaatagtggccaaggttatcgtgtggaggagagtaatggatgtttgatgttgggttggcacactcgtccactcattaccacctccgcttggaaactctcgacggcggcgtactgagtttgactcgaagcatacgacggtggtggagtcgagtcgagtgaatttgagattgagatcagtggaccggtgatgacatatgttcggaccaagacctaaaccgaactgaatcgaaccgttttgccttttgtttattttatttattttcgttcacttgtttaaaattcttatatatatcgttttggtaggtcatttttaatttatgcctttttgggatcaatttttaataggctgagtttgtatttattaataaattatctttatgaattttaaactaaaactatgttttaatctcat

SEQ ID NO: 108347 - protein, 587 aa, Arabidopsis thaliana; identical to SEQ ID NO: 45017
  peptide (1)..(587): Ceres Seq. ID no. 13653899

SEQ ID NO: 108348 - protein, 559 aa, Arabidopsis thaliana; identical to SEQ ID NO: 45018
  peptide (1)..(559): Ceres Seq. ID no. 13653900

SEQ ID NO: 108349 - protein, 558 aa, Arabidopsis thaliana; identical to SEQ ID NO: 45019
  peptide (1)..(558): Ceres Seq. ID no. 13653901

SEQ ID NO: 108350 - DNA, 1130 bp, Arabidopsis thaliana
  misc_feature (1)..(1130): Ceres Seq. ID no. 13653918
  misc_feature (1)..(1130): Ortholog of  Ceres SEQ ID NO 12582251 as cited in SEQ ID NO 55724
tttcatgaaaaaccaatctagggttttgaactctgaattgggggattttgacctttcagttttgtgggatcaaattttgaatttcgagggttatggttcctactgtttcagaccaatggatatggatggttaccacaaacggagcgccggtttaaacccttgtaaacactccggtttctcacattcatcaagacccatggctccaggaatttaccgttacccagaagtgaaatcttcgttgcggagacaagttcatgcgcctgtgcggatactcaatagcggtcgagatcgtagcacacgacaaggttctggtaatgtgttgggaacctttctcacaaggaacaatgacatgtggaaaagaaatgcacttgattcgtctttacgctatagaacggatagagaagtaattgatgttgatgatgagcttggagatgttgaaatgatatctgatgatacaagtagggagggtgtcgaaaacgtggctatggaggtggacgaggtggaagagaaggcggagatgggaaatggattgttttctgaggttgccagtctgaaaaatgggagcttgagggtgggtgaatgttctaaagctaatagtagttcactcgttgtgaatcgccctgtgactgatgtcacaagttttgaagcatacagaaaggttcttgagagtgctgtgaaccggacttctaaactgaaagacagaggctttgttgatttttttaaagagagaggtcgtgctttactacgaagcttgtcttccttttggagacaagatgaagaaccagtagaggttgtacaacgtgaggcatttgtacctctttctagagaggaggagacagcagtcaggcgtgcattctcagctaatgattcaaacatcttggttactcataagaactcaaatattgatattaccgggaaaatcttgaggtgccttaaaccaggcaaatggttgaacgatgaggtcattaatctttatatggtattgctgaaagaaagggaagctagagaaccaaagaagtttcttaaatgtcattttttcaatacatttttcttcactaagttagttaattcggcgactggatacaactatggtgcagtgagaagatggacttcaatgaagaggttgggct

SEQ ID NO: 108351 - protein, 376 aa, Arabidopsis thaliana
  peptide (1)..(376): Ceres Seq. ID no. 13653919
FMKNQSRVLNSELGDFDLSVLWDQILNFEGYGSYCFRPMDMDGYHKRSAGLNPCKHSGFSHSSRPMAPGIYRYPEVKSSLRRQVHAPVRILNSGRDRSTRQGSGNVLGTFLTRNNDMWKRNALDSSLRYRTDREVIDVDDELGDVEMISDDTSREGVENVAMEVDEVEEKAEMGNGLFSEVASLKNGSLRVGECSKANSSSLVVNRPVTDVTSFEAYRKVLESAVNRTSKLKDRGFVDFFKERGRALLRSLSSFWRQDEEPVEVVQREAFVPLSREEETAVRRAFSANDSNILVTHKNSNIDITGKILRCLKPGKWLNDEVINLYMVLLKEREAREPKKFLKCHFFNTFFFTKLVNSATGYNYGAVRRWTSMKRLG

SEQ ID NO: 108352 - protein, 375 aa, Arabidopsis thaliana
  peptide (1)..(375): Ceres Seq. ID no. 13653920
MKNQSRVLNSELGDFDLSVLWDQILNFEGYGSYCFRPMDMDGYHKRSAGLNPCKHSGFSHSSRPMAPGIYRYPEVKSSLRRQVHAPVRILNSGRDRSTRQGSGNVLGTFLTRNNDMWKRNALDSSLRYRTDREVIDVDDELGDVEMISDDTSREGVENVAMEVDEVEEKAEMGNGLFSEVASLKNGSLRVGECSKANSSSLVVNRPVTDVTSFEAYRKVLESAVNRTSKLKDRGFVDFFKERGRALLRSLSSFWRQDEEPVEVVQREAFVPLSREEETAVRRAFSANDSNILVTHKNSNIDITGKILRCLKPGKWLNDEVINLYMVLLKEREAREPKKFLKCHFFNTFFFTKLVNSATGYNYGAVRRWTSMKRLG

SEQ ID NO: 108353 - protein, 338 aa, Arabidopsis thaliana
  peptide (1)..(338): Ceres Seq. ID no. 13653921
MDMDGYHKRSAGLNPCKHSGFSHSSRPMAPGIYRYPEVKSSLRRQVHAPVRILNSGRDRSTRQGSGNVLGTFLTRNNDMWKRNALDSSLRYRTDREVIDVDDELGDVEMISDDTSREGVENVAMEVDEVEEKAEMGNGLFSEVASLKNGSLRVGECSKANSSSLVVNRPVTDVTSFEAYRKVLESAVNRTSKLKDRGFVDFFKERGRALLRSLSSFWRQDEEPVEVVQREAFVPLSREEETAVRRAFSANDSNILVTHKNSNIDITGKILRCLKPGKWLNDEVINLYMVLLKEREAREPKKFLKCHFFNTFFFTKLVNSATGYNYGAVRRWTSMKRLG

SEQ ID NO: 108354 - DNA, 833 bp, Arabidopsis thaliana
  misc_feature (1)..(833): Ceres Seq. ID no. 13653929
  misc_feature (1)..(833): Ortholog of  Ceres SEQ ID NO 15174142 as cited in SEQ ID NO 64367
atatacttcagtctagagccgcgcaagaagacgattctctctcttgagttgaagaaatgaagcacaacaatgttatccccaatggtcacttcaaaaagcactggcagaattatgtcaagacatggttcaaccagcctgccaggaaaaccagaagaagaattgcgaggcaaaagaaggctgtgaagatcttccctcgtccaacttctggacctctccgccctgttgtgcatggtcagactcttaagtacaacatgaaggtcagaaccggtaaaggattcactcttgaagagctcaaggctgctggtatcccaaagaagttggcgcctacaattggtattgctgttgaccatcgtcgcaagaaccgatctttggagggtcttcaaacaaatgtccagaggctgaaaacctacaagaccaagttagtcattttcccgcgtcgtgcccgcaaggtcaaggctggtgactctacaccagaagagttggctaatgctacccaagttcaaggagactacttgcctattgtacgtgagaagcctaccatggaactcgtcaagctgacttcagaaatgaagtctttcaaggcttttgacaagatacgccttgagcgcactaacaagaggcatgccggagctagagccaagagagccgcagaggctgagaaagaagagaagaagtgaggtcgttcttcttaggtagaagaaacttttatcttatcaacttttggaactgaattttgtgtatcagactgtcttttctttcatcagtttttatccttaaatctttgattttgctgctaccttgcttctcttgatttatggaaaagaccgtatctc

SEQ ID NO: 108355 - protein, 206 aa, Arabidopsis thaliana [sequence omitted]

SEQ ID NO: 108356 - protein, 141 aa, Arabidopsis thaliana; identical to SEQ ID NO: 25776
  peptide (1)..(141): Ceres Seq. ID no. 13653931

SEQ ID NO: 108357 - DNA, 1079 bp, Arabidopsis thaliana
  misc_feature (1)..(1079): Ceres Seq. ID no. 13667104
  misc_feature (1)..(1079): Ortholog of  Ceres SEQ ID NO 15180382 as cited in SEQ ID NO 0
cggcctaccccattggaagtgtcatgaaaaagaacgtcaaagtggtaagaagaacgaatcctcaagtgaaggtgaaccagcaaatgttactgatacagtcggagaccatgttgttgatgctagcaatctgtctagctccatagatccttccagtagtggttcgcatgtacatgatcctgaatttgatgttatctttcttcatggcttgcgtggtgggccctttaaaacttggcgaattgctgaggataaatcttctaccaaatctggcttggtggagaagattgaccaggaagcaggaaagctgggaacattttggccgagcgagtggctttcaaatgatttccctcaagctcgcttgtttacccttaaatacaagtatgggaggtcttgtcgtgaagcagattctacacaaagcaaaggaagaaaaacttgataaactagtcaataacactgctggagttgtattctacagttgcccacattttggcagcaagctagcagatatgccgtggagaatgggtcttgtgttacgcccggctccatctataggagagctacgaagtggttctccaagactagttgagctcaatgacttgcttcgccagctccataagaaaggggttgttgaagtccttagtttctgtgagacaaaagtaaccccaatcgtggaaggctatggaggatgggcttttcggatggaaatcgtgccaattgaatcagcatacccaggatttggtgaacttgttgtgttggagtcaacagaccatataaattcatgtaaaccactgagccgctcggatccttcgtatacagaggcgttgcagttcctgcgcaagctcagcgcacagcgattaaaacctcatgttaaacgggaacctgggatacatgattgattaaccatggttaggttaaccgaagatgaaccaaaggtcattggttttggctaattgacgctatagtttttttcatttcttgtgtgtacataacaagaaccacgcttaggctcttttgtttcattttacacattgtttcatctgtattactggattacacaattggaagtaaatataaagattctc

SEQ ID NO: 108358 - protein, 242 aa, Arabidopsis thaliana
  peptide (1)..(242): Ceres Seq. ID no. 13667105
MYMILNLMLSFFMACVVGPLKLGELLRINLLPNLAWWRRLTRKQESWEHFGRASGFQMISLKLACLPLNTSMGGLVVKQILHKAKEEKLDKLVNNTAGVVFYSCPHFGSKLADMPWRMGLVLRPAPSIGELRSGSPRLVELNDLLRQLHKKGVVEVLSFCETKVTPIVEGYGGWAFRMEIVPIESAYPGFGELVVLESTDHINSCKPLSRSDPSYTEALQFLRKLSAQRLKPHVKREPGIHD

SEQ ID NO: 108359 - protein, 240 aa, Arabidopsis thaliana
  peptide (1)..(240): Ceres Seq. ID no. 13667106
MILNLMLSFFMACVVGPLKLGELLRINLLPNLAWWRRLTRKQESWEHFGRASGFQMISLKLACLPLNTSMGGLVVKQILHKAKEEKLDKLVNNTAGVVFYSCPHFGSKLADMPWRMGLVLRPAPSIGELRSGSPRLVELNDLLRQLHKKGVVEVLSFCETKVTPIVEGYGGWAFRMEIVPIESAYPGFGELVVLESTDHINSCKPLSRSDPSYTEALQFLRKLSAQRLKPHVKREPGIHD

SEQ ID NO: 108360 - protein, 235 aa, Arabidopsis thaliana
  peptide (1)..(235): Ceres Seq. ID no. 13667107
MLSFFMACVVGPLKLGELLRINLLPNLAWWRRLTRKQESWEHFGRASGFQMISLKLACLPLNTSMGGLVVKQILHKAKEEKLDKLVNNTAGVVFYSCPHFGSKLADMPWRMGLVLRPAPSIGELRSGSPRLVELNDLLRQLHKKGVVEVLSFCETKVTPIVEGYGGWAFRMEIVPIESAYPGFGELVVLESTDHINSCKPLSRSDPSYTEALQFLRKLSAQRLKPHVKREPGIHD

SEQ ID NO: 108361 - DNA, 1403 bp, Arabidopsis thaliana
  misc_feature (1)..(1403): Ceres Seq. ID no. 13667108
  misc_feature (1)..(1403): Ortholog of  Ceres SEQ ID NO 15180382 as cited in SEQ ID NO 0
aatggcttgatgattgtgcaaaaggaaatatttcctgttgcaatgaccctaagacacaaagttatgcaagagcttctctgttaaatgtatattgcaatcagcaagatggtagtggatcaggagacggtggcagttccaagccagacatctctaacatgaacagcaactgtcctcgctatggagacatgatatttttaattaatcccggcctaccccattggaagtgtcatgaaaaagaacgtcaaagtggtaagaagaacgaatcctcaagtgaaggtgaaccagcaaatgttactgatacagtcggagaccatgttgttgatgctagcaatctgtctagctccatagatccttccagtagtggttcgcatgtacatgatcctgaatttgatgttatctttcttcatggcttgcgtggtgggccctttaaaacttggcgaattgctgaggataaatcttctaccaaatctggcttggtggagaagattgaccaggaagcaggaaagctgggaacattttggccgagcgagtggctttcaaatgatttccctcaagctcgcttgtttacccttaaatacaagacaaacctcacggaatggtctggagctagcttgccacttcaggaagttagttctatgatattggaaaagctcgtctcagcaggcattggagaccgacctgttgtttttgtgactcacagtatgggaggtcttgtcgtgaagcagattctacacaaagcaaaggaagaaaaacttgataaactagtcaataacactgctggagttgtattctacagttgcccacattttggcagcaagctagcagatatgccgtggagaatgggtcttgtgttacgcccggctccatctataggagagctacgaagtggttctccaagactagttgagctcaatgacttgcttcgccagctccataagaaaggggttgttgaagtccttagtttctgtgagacaaaagtaaccccaatcgtggaaggctatggaggatgggcttttcggatggaaatcgtgccaattgaatcagcatacccaggatttggtgaacttgttgtgttggagtcaacagaccatataaattcatgtaaaccactgagccgctcggatccttcgtatacagaggcgttgcagttcctgcgcaagctcagcgcacagcgattaaaacctcatgttaaacgggaacctgggatacatgattgattaaccatggttaggttaaccgaagatgaaccaaaggtcattggttttggctaattgacgctatagtttttttcatttcttgtgtgtacataacaagaaccacgcttaggctcttttgtttcattttacacattgtttcatctgtattactggattacacaattggaagtaaatataaagattctc

SEQ ID NO: 108362 - protein, 404 aa, Arabidopsis thaliana
  peptide (1)..(404): Ceres Seq. ID no. 13667109
WLDDCAKGNISCCNDPKTQSYARASLLNVYCNQQDGSGSGDGGSSKPDISNMNSNCPRYGDMIFLINPGLPHWKCHEKERQSGKKNESSSEGEPANVTDTVGDHVVDASNLSSSIDPSSSGSHVHDPEFDVIFLHGLRGGPFKTWRIAEDKSSTKSGLVEKIDQEAGKLGTFWPSEWLSNDFPQARLFTLKYKTNLTEWSGASLPLQEVSSMILEKLVSAGIGDRPVVFVTHSMGGLVVKQILHKAKEEKLDKLVNNTAGVVFYSCPHFGSKLADMPWRMGLVLRPAPSIGELRSGSPRLVELNDLLRQLHKKGVVEVLSFCETKVTPIVEGYGGWAFRMEIVPIESAYPGFGELVVLESTDHINSCKPLSRSDPSYTEALQFLRKLSAQRLKPHVKREPGIHD

SEQ ID NO: 108363 - protein, 353 aa, Arabidopsis thaliana
  peptide (1)..(353): Ceres Seq. ID no. 13667110
MNSNCPRYGDMIFLINPGLPHWKCHEKERQSGKKNESSSEGEPANVTDTVGDHVVDASNLSSSIDPSSSGSHVHDPEFDVIFLHGLRGGPFKTWRIAEDKSSTKSGLVEKIDQEAGKLGTFWPSEWLSNDFPQARLFTLKYKTNLTEWSGASLPLQEVSSMILEKLVSAGIGDRPVVFVTHSMGGLVVKQILHKAKEEKLDKLVNNTAGVVFYSCPHFGSKLADMPWRMGLVLRPAPSIGELRSGSPRLVELNDLLRQLHKKGVVEVLSFCETKVTPIVEGYGGWAFRMEIVPIESAYPGFGELVVLESTDHINSCKPLSRSDPSYTEALQFLRKLSAQRLKPHVKREPGIHD

SEQ ID NO: 108364 - protein, 343 aa, Arabidopsis thaliana
  peptide (1)..(343): Ceres Seq. ID no. 13667111
MIFLINPGLPHWKCHEKERQSGKKNESSSEGEPANVTDTVGDHVVDASNLSSSIDPSSSGSHVHDPEFDVIFLHGLRGGPFKTWRIAEDKSSTKSGLVEKIDQEAGKLGTFWPSEWLSNDFPQARLFTLKYKTNLTEWSGASLPLQEVSSMILEKLVSAGIGDRPVVFVTHSMGGLVVKQILHKAKEEKLDKLVNNTAGVVFYSCPHFGSKLADMPWRMGLVLRPAPSIGELRSGSPRLVELNDLLRQLHKKGVVEVLSFCETKVTPIVEGYGGWAFRMEIVPIESAYPGFGELVVLESTDHINSCKPLSRSDPSYTEALQFLRKLSAQRLKPHVKREPGIHD

SEQ ID NO: 108365 - DNA, 1542 bp, Arabidopsis thaliana
  misc_feature (1)..(1542): Ceres Seq. ID no. 13667128
  misc_feature (1)..(1542): Ortholog of  Ceres SEQ ID NO 13595164 as cited in SEQ ID NO 56222
  misc_feature (1)..(1542): Ortholog of  Ceres SEQ ID NO 13595665 as cited in SEQ ID NO 59902
  misc_feature (1)..(1542): Ortholog of  Ceres SEQ ID NO 14302438 as cited in SEQ ID NO 62982
  misc_feature (1)..(1542): Ortholog of  Ceres SEQ ID NO 13591068 as cited in SEQ ID NO 69043
  misc_feature (1)..(1542): Ortholog of  Ceres SEQ ID NO 13623041 as cited in SEQ ID NO 0
tacgtcagggtttagtcttactatcatttcttgattttggtatcaaatttatctagttttcactgttctttactaaatttttattttgtctcttatctactttagagtttagaagttccatattaaaaattttagttatgaaacaatataaccaaaaaattgccaagattgttcttgaatcttacttgtgcattgtaaatagagtctgttagcaaactttgaccattgagtattttgtgctttgtgtctagattcttgaatcttattctatggttattggacttcataaatccattttgttctttagtagttggtacccaaatattgatttttcaatagtttcagaaaacagaccaacatggaagatcggtgcttgatcaagaacgatatcactgaattgattggtaacacaccaatggtgtatctgaacaatgttgttgatggttgcgtggctcgtatcgctgcgaagcttgagatgatggagccttgttctagcgtcaaagacagaatcgcgtatagtatgatcaaagatgcagaagacaaaggattgattactcccggaaagagtacattgatagagccaactgctggtaacaccgggattggtttagcttgcatgggagctgcaagaggctataaagtgatccttgtgatgccttcaactatgagcttagagagaagaatcattctgagggcactaggtgcagagcttcatctctcggaccagcgcataggccttaaaggaatgttggagaaaactgaagcgattttaagcaaaactcctggtggttacattccacaacaatttgaaaatcctgcaaaccccgagattcattaccgaaccacgggaccggaaatatggagagattcagccgggaaagtagatatattggtcgctggcgtagggactggtggaactgctactggagtagggaagttcctcaaggagcagaacaaagacatcaaggtttgtgtggtggaaccagtagaaagtccggtacttagcggaggtcaaccaggtccacatttgattcagggaattggctctggtatcgtcccattcaatttggacttaaccattgttgatgaaattattcaagtggcaggtgaagaggctattgaaacagccaagcttcttgccctcaaagaaggattactggtgggaatatcctctggagccgcagcagcggctgcgttaaaggttgcaaagcggccagaaaacgcggggaaactcattgtggtggtttttcctagtggaggagaacgttatttatcgactaaactgttcgattcgattagatatgaagcagagaatttgcctattgaatgaatgttggacgtgtgccggtttcgtgtgtaataagagacgttcgttccaagagtccaagatttcaatttgcttattactggtcaatgtgaaatgtataaaaagttgcatattcgattatgaataattttagttgactacttccattgcaattcttggtcgaaaacatgaattttaataaaacagaataatctacatgaacgtttcattgactc

SEQ ID NO: 108366 - protein, 323 aa, Arabidopsis thaliana; identical to SEQ ID NO: 75872
  peptide (1)..(323): Ceres Seq. ID no. 13667129

SEQ ID NO: 108367 - protein, 304 aa, Arabidopsis thaliana; identical to SEQ ID NO: 75873
  peptide (1)..(304): Ceres Seq. ID no. 13667130

SEQ ID NO: 108368 - protein, 284 aa, Arabidopsis thaliana; identical to SEQ ID NO: 75874
  peptide (1)..(284): Ceres Seq. ID no. 13667131

SEQ ID NO: 108369 - DNA, 1281 bp, Arabidopsis thaliana
  misc_feature (1)..(1281): Ceres Seq. ID no. 13667195
  misc_feature (1)..(1281): Ortholog of  Ceres SEQ ID NO 15178260 as cited in SEQ ID NO 59907
  misc_feature (1)..(1281): Ortholog of  Ceres SEQ ID NO 14313548 as cited in SEQ ID NO 68496
actctctctctatctctatatatcgacacaccataaaagttgttctttctctccgtttccttagcctctgcatctgggcgattttctctttctatctccctacaccttagggagtactgatcctaaactcatcatctttctatgccttcctcttttctttcacttattttcttttctattttttttctttcttactttgcgtaaaactagcgagtcaaaaataaagacacttgcatgatcctaatataatattatatattgtaattagagaaagagagagaagagaagaaagaaagtggcagtagattcttatggattttggtataaagaaacatgaaaaaatgggtttgaccgaagaaactttgaggacgctttttgtatgcaaccccaaatagcagcttaaagaaagcagagaggatcttcttttatttcccctctgagcaacagaagccattattcaaagaaaggcttctttaatttactcgcagggagagggaaaagagaaaaaattgaaaaactccattttcaagtcattaaaatggcatcttcttcaacaaactcaccatgcgccgcttgcaaattcctccggcgaaaatgtcaaccggaatgtgtattcgcgccctatttcccaccggaccagccacaaaaattcgcaaacgttcacaaagtgtttggagcaagtaacgtgacaaagctcctcaacgagcttcacccttcacaacgtgaagacgcagtgaactctttggcctatgaagccgacatgcgcctccgtgaccctgtctacggctgcgtcggcgtcatctctctcctccaacatcagcttcgtcagcttcagatagatctcagctgtgctaaatctgagctctctaagtaccaaagcctcggtatcctcgccgccactcatcagagtcttggcatcaacttactcgccggagcagcagatggaacagccaccgccgtgagagaccactatcaccaccaccagttttttcctagagaacaaatgtttggtggcttggatgttccggccggtaacaactacgacggtgggattcttgccattggacagatcactcagtttcagcagccgagagccgccgctggagatgatggtcgccgtactgttgatccgtcttgagattttagggttttggtggtgttcatcttcgtcgatcgcttggtgatgagaaaactataattttaagaaaatatttgatgtggaaaaccaaaatattttaaacgtatggtacgtctctcttaatgacattaatttcggttttt

SEQ ID NO: 108370 - protein, 199 aa, Arabidopsis thaliana; identical to SEQ ID NO: 29134
  peptide (1)..(199): Ceres Seq. ID no. 13667196

SEQ ID NO: 108371 - protein, 125 aa, Arabidopsis thaliana; identical to SEQ ID NO: 29135
  peptide (1)..(125): Ceres Seq. ID no. 13667197

SEQ ID NO: 108372 - DNA, 2312 bp, Arabidopsis thaliana
  misc_feature (1)..(2312): Ceres Seq. ID no. 13667279
  misc_feature (1)..(2312): Ortholog of  Ceres SEQ ID NO 14308618 as cited in SEQ ID NO 58541
gcggccgccacggaaacaagcaattcgatcaaacgtgaaagcaatatttaagatttttgtctcatactctaagcaagcaatatccaaataaacattcttatacctccactcctcctctgtctgattccttcacccaattcttgtctcgtttccatcaatccattgtctttgattccagaggttcttggtttatttggatgtggtgattatggatatggagtcttggaagttgctcagaagtgtttgtgtgctttcttttctccttggctcttgttttgtgtatcaaagccttcgtgttgttgatgctcaagaagatccaaaaccagccgtgactttgcaagtagatgcttctaatggaggtggacgacccattcctgaaacgctatttgggattttcttcgaggagatcaaccatgctggtgccggtggattatgggccgaacttgttagcaacagagggtttgaagctggtgggcaaaacacaccctctaatatttggccatggtccattgttggtgatcattcatccatatatgtagctacagaccgttcatcatgttttgaacggaataaaatcgcactgagaatggatgtgctttgtgatagcaaaggttgtccatcgggaggtgtcggagtttataaccctggttactggggcatgaatattgaagaaggaaagaagtacaaggtggctctttatgtgcgttcgactggtgatatcgatttgtctgtgtcgttgacgagctcgaatggatcacggactcttgcttctgaaaagatcatagcttctgcttctgatgtttcgaaatggattaaaaaagaggttcttttggaggcaaaagcgaccgatcctagtgcaagacttcagttaacaacaaccaagaaagggtcaatatggattgaccaagtctcggccatgccagtggatactcacaagggacatggttttagaaacgatcttttccacctgatggccgatataaaaccccgtttcatccggttcccaggtggttgttttgtcgagggtgaatggttaagtaatgccttccgctggaaagaaaccgtaggaccttgggaagagagaccgggccattttggtgatgtttggaagtattggaccgatgatggccttggccactttgagttctttcaaatggcagaagacatcggtgcagccccgatatgggtgtttaacaacgggataagtcacaatgatgaagttgaaactgccagtatcatgccctttgttcaagaagcactcgacggtatcgagtttgcccgaggagatgccaattctacttggggatctgttcgagctaaaatgggacgccaagaaccttttgaacttaaatacgttgctattggaaatgaagattgtgggaaaacttactacagaggaaactacattgtgttctatgatgctatcaagaaagcctatccagatatcaaaatcatctccaactgcgatggatcctctcatccactcgaccacccagctgattactatgactatcacatttacacttctgctagcaatttgttttccatgtatcatcaatttgatggcacttcacgcaaaggtccaaaggcttttgtcagtgaatatgctgttactggaaaagatgctggtacaggaagccttcttgcctctcttgcagaagctgcgtttctcattggtcttgaaaagaatagtgacattgttgacatggcaagttatgctccactctttgtgaacacaaatgatagacggtggaaccctgatgcaatagtcttcaactcctctcatctatatggaacacctagctattgggttcaacggttttttgcagagtcaagcggagcaactcttctcacttcaacactcaagggaaactctacttctcttgttgcatctgctatctcttggaaaaacaatggcaaagattacatacgcataaaggctgtaaacttcggagctaactcagaaaatatgcaagtgttggtaactggattggacccgaacgtgatgagagtttcgggatcaaagaagacagtacttacctctaccaatgtgatggatgaaaattccttctcacagccagagaaggttgtaccacatgaaagcttgctagagttggcagaggaggatatgaccgttgttctcccgccacattccttttcttcattcgatttgttgaaggaatctgcaaagataagaatgccaatctctgattcttcttcccatcagaaaactaccactgtgtgaagagaaacaatgacaaggaagtatcaactttcatgtcaaaagtctctttgtggttcaaagcggccgc

SEQ ID NO: 108373 - protein, 678 aa, Arabidopsis thaliana
  peptide (1)..(678): Ceres Seq. ID no. 13667280
MDMESWKLLRSVCVLSFLLGSCFVYQSLRVVDAQEDPKPAVTLQVDASNGGGRPIPETLFGIFFEEINHAGAGGLWAELVSNRGFEAGGQNTPSNIWPWSIVGDHSSIYVATDRSSCFERNKIALRMDVLCDSKGCPSGGVGVYNPGYWGMNIEEGKKYKVALYVRSTGDIDLSVSLTSSNGSRTLASEKIIASASDVSKWIKKEVLLEAKATDPSARLQLTTTKKGSIWIDQVSAMPVDTHKGHGFRNDLFHLMADIKPRFIRFPGGCFVEGEWLSNAFRWKETVGPWEERPGHFGDVWKYWTDDGLGHFEFFQMAEDIGAAPIWVFNNGISHNDEVETASIMPFVQEALDGIEFARGDANSTWGSVRAKMGRQEPFELKYVAIGNEDCGKTYYRGNYIVFYDAIKKAYPDIKIISNCDGSSHPLDHPADYYDYHIYTSASNLFSMYHQFDGTSRKGPKAFVSEYAVTGKDAGTGSLLASLAEAAFLIGLEKNSDIVDMASYAPLFVNTNDRRWNPDAIVFNSSHLYGTPSYWVQRFFAESSGATLLTSTLKGNSTSLVASAISWKNNGKDYIRIKAVNFGANSENMQVLVTGLDPNVMRVSGSKKTVLTSTNVMDENSFSQPEKVVPHESLLELAEEDMTVVLPPHSFSSFDLLKESAKIRMPISDSSSHQKTTTV

SEQ ID NO: 108374 - protein, 676 aa, Arabidopsis thaliana
  peptide (1)..(676): Ceres Seq. ID no. 13667281
MESWKLLRSVCVLSFLLGSCFVYQSLRVVDAQEDPKPAVTLQVDASNGGGRPIPETLFGIFFEEINHAGAGGLWAELVSNRGFEAGGQNTPSNIWPWSIVGDHSSIYVATDRSSCFERNKIALRMDVLCDSKGCPSGGVGVYNPGYWGMNIEEGKKYKVALYVRSTGDIDLSVSLTSSNGSRTLASEKIIASASDVSKWIKKEVLLEAKATDPSARLQLTTTKKGSIWIDQVSAMPVDTHKGHGFRNDLFHLMADIKPRFIRFPGGCFVEGEWLSNAFRWKETVGPWEERPGHFGDVWKYWTDDGLGHFEFFQMAEDIGAAPIWVFNNGISHNDEVETASIMPFVQEALDGIEFARGDANSTWGSVRAKMGRQEPFELKYVAIGNEDCGKTYYRGNYIVFYDAIKKAYPDIKIISNCDGSSHPLDHPADYYDYHIYTSASNLFSMYHQFDGTSRKGPKAFVSEYAVTGKDAGTGSLLASLAEAAFLIGLEKNSDIVDMASYAPLFVNTNDRRWNPDAIVFNSSHLYGTPSYWVQRFFAESSGATLLTSTLKGNSTSLVASAISWKNNGKDYIRIKAVNFGANSENMQVLVTGLDPNVMRVSGSKKTVLTSTNVMDENSFSQPEKVVPHESLLELAEEDMTVVLPPHSFSSFDLLKESAKIRMPISDSSSHQKTTTV

SEQ ID NO: 108375 - protein, 552 aa, Arabidopsis thaliana
  peptide (1)..(552): Ceres Seq. ID no. 13667282
MDVLCDSKGCPSGGVGVYNPGYWGMNIEEGKKYKVALYVRSTGDIDLSVSLTSSNGSRTLASEKIIASASDVSKWIKKEVLLEAKATDPSARLQLTTTKKGSIWIDQVSAMPVDTHKGHGFRNDLFHLMADIKPRFIRFPGGCFVEGEWLSNAFRWKETVGPWEERPGHFGDVWKYWTDDGLGHFEFFQMAEDIGAAPIWVFNNGISHNDEVETASIMPFVQEALDGIEFARGDANSTWGSVRAKMGRQEPFELKYVAIGNEDCGKTYYRGNYIVFYDAIKKAYPDIKIISNCDGSSHPLDHPADYYDYHIYTSASNLFSMYHQFDGTSRKGPKAFVSEYAVTGKDAGTGSLLASLAEAAFLIGLEKNSDIVDMASYAPLFVNTNDRRWNPDAIVFNSSHLYGTPSYWVQRFFAESSGATLLTSTLKGNSTSLVASAISWKNNGKDYIRIKAVNFGANSENMQVLVTGLDPNVMRVSGSKKTVLTSTNVMDENSFSQPEKVVPHESLLELAEEDMTVVLPPHSFSSFDLLKESAKIRMPISDSSSHQKTTTV

SEQ ID NO: 108376 - DNA, 1735 bp, Arabidopsis thaliana
  misc_feature (1)..(1735): Ceres Seq. ID no. 13667293
  misc_feature (1)..(1735): Ortholog of  Ceres SEQ ID NO 14307728 as cited in SEQ ID NO 54710
ccggtccggaaattcccgggtcgacccacgcgtccggtacgacgtgtgtgggttggtaaaaacactctgttatcaactcctgctgtatcagctgtgattcgtgaaagatcaggggctgatggatcgaaagcaactggagcatttatcttaacagcaagccacaatcctggtggccctactgaggattttggaatcaaatacaatatggaaaatggaggacctgctcctgaatcaatcactgataaaatttacgagaacactaagacaatcaaggagtacccaatagcacaagatctgcccaatgttgatatttctgctgttggtgtaaccagttttgaaggacctgaaggaaaatttgatgttgaagtttttgattccgcagatgactacgttaaattaatgaagtcaatcttcgattttgaagccatccggaaattgctatcatctccaaagtttacattctgctatgatgcattgcatggagttgctggagcctatgcacatcgcatctttgtcgaagaactcggtgcgcaagaaagcgcattattgaactgcactcccaaggaggactttggaggagggcatccggatcccaatttgacctatgctaaggagcttgtggcacgaatgggattaggtaaatccgacactggaggtgaacctccagagtttggcgccgctgctgatggtgatgcagaccgtaacatgatccttggtaaaaggttctttgtaactccttcggattcagttgccataattgctgcaaatgctattggtgccatcccgtacttcagctctggtttgaaaggtgttgcaaggagcatgccaacctcagctgctcttgatgtcgttgcaaaaagcttgaatttgaagttctttgaggttccaacaggctggaagttttttggtaatctgatggatgctgggatgtgttctgtttgtggagaagaaagttttggaactggctcggatcatatccgtgagaaagacggaatatgggcagttcttgcatggatgtctatacttgctcacaagaacaagggaaatattgacggtaacgctaaactggtgtcagttgaagacattgtccgccagcattgggctacctacggtcgtcactattacactcgttacgactatgagaatgtagacgcaggtaaagctaaggaactgatggagcatttggtcaaattgcaatcttcaattcctgaagttaacaagattgtgaaaggaattcgttcggacgtggcaagcgtcgccagtgctgatgaattcgagtacaaagatccagttgatggatccatttcgaagcaccagggaatccgttacttgtttgaagacggatcacgacttgttttccgtctctctggaactggctcagaaggagcaaccatccggctttacatcgaacagtacgaaaaggatgcttcaaaaaccggccgagaatcccaggaagctttgtctcctctggttgacttagctctaaagctgtcgaagatggaagagttcacaggccgatcagcccccaccgtcataacataagaagggtcaagctcaacgactcaaaccattcaccttttcgtctatatgatgttttcttcttatactatccaagttacattataagaataattagtctcagggagaatttgtatttctcatcagaattctgaacaaccaagactgatttcttgagttgttgtgaggcttatacttgtacggatttggctttctc

SEQ ID NO: 108377 - protein, 513 aa, Arabidopsis thaliana
  peptide (1)..(513): Ceres Seq. ID no. 13667294
PVRKFPGRPTRPVRRVWVGKNTLLSTPAVSAVIRERSGADGSKATGAFILTASHNPGGPTEDFGIKYNMENGGPAPESITDKIYENTKTIKEYPIAQDLPNVDISAVGVTSFEGPEGKFDVEVFDSADDYVKLMKSIFDFEAIRKLLSSPKFTFCYDALHGVAGAYAHRIFVEELGAQESALLNCTPKEDFGGGHPDPNLTYAKELVARMGLGKSDTGGEPPEFGAAADGDADRNMILGKRFFVTPSDSVAIIAANAIGAIPYFSSGLKGVARSMPTSAALDVVAKSLNLKFFEVPTGWKFFGNLMDAGMCSVCGEESFGTGSDHIREKDGIWAVLAWMSILAHKNKGNIDGNAKLVSVEDIVRQHWATYGRHYYTRYDYENVDAGKAKELMEHLVKLQSSIPEVNKIVKGIRSDVASVASADEFEYKDPVDGSISKHQGIRYLFEDGSRLVFRLSGTGSEGATIRLYIEQYEKDASKTGRESQEALSPLVDLALKLSKMEEFTGRSAPTVIT

SEQ ID NO: 108378 - protein, 445 aa, Arabidopsis thaliana
  peptide (1)..(445): Ceres Seq. ID no. 13667295
MENGGPAPESITDKIYENTKTIKEYPIAQDLPNVDISAVGVTSFEGPEGKFDVEVFDSADDYVKLMKSIFDFEAIRKLLSSPKFTFCYDALHGVAGAYAHRIFVEELGAQESALLNCTPKEDFGGGHPDPNLTYAKELVARMGLGKSDTGGEPPEFGAAADGDADRNMILGKRFFVTPSDSVAIIAANAIGAIPYFSSGLKGVARSMPTSAALDVVAKSLNLKFFEVPTGWKFFGNLMDAGMCSVCGEESFGTGSDHIREKDGIWAVLAWMSILAHKNKGNIDGNAKLVSVEDIVRQHWATYGRHYYTRYDYENVDAGKAKELMEHLVKLQSSIPEVNKIVKGIRSDVASVASADEFEYKDPVDGSISKHQGIRYLFEDGSRLVFRLSGTGSEGATIRLYIEQYEKDASKTGRESQEALSPLVDLALKLSKMEEFTGRSAPTVIT

SEQ ID NO: 108379 - protein, 380 aa, Arabidopsis thaliana
  peptide (1)..(380): Ceres Seq. ID no. 13667296
MKSIFDFEAIRKLLSSPKFTFCYDALHGVAGAYAHRIFVEELGAQESALLNCTPKEDFGGGHPDPNLTYAKELVARMGLGKSDTGGEPPEFGAAADGDADRNMILGKRFFVTPSDSVAIIAANAIGAIPYFSSGLKGVARSMPTSAALDVVAKSLNLKFFEVPTGWKFFGNLMDAGMCSVCGEESFGTGSDHIREKDGIWAVLAWMSILAHKNKGNIDGNAKLVSVEDIVRQHWATYGRHYYTRYDYENVDAGKAKELMEHLVKLQSSIPEVNKIVKGIRSDVASVASADEFEYKDPVDGSISKHQGIRYLFEDGSRLVFRLSGTGSEGATIRLYIEQYEKDASKTGRESQEALSPLVDLALKLSKMEEFTGRSAPTVIT

SEQ ID NO: 108380 - DNA, 1211 bp, Arabidopsis thaliana
  misc_feature (1)..(1211): Ceres Seq. ID no. 13667301
  misc_feature (1)..(1211): Ortholog of  Ceres SEQ ID NO 13598528 as cited in SEQ ID NO 64938
gcacgaggaatttgggaatggacggagaagagcttaccgagcaggagactgccttgtacgaccgccagattagggtttggggcgctaatgctcagagaagattgaccaaagctcatatcttggtatctggaattaaggggactgttgctgagttttgcaagaacattgtgctggcaggagttggttcagtgactttaatggatgatcgtttagcaaacatggaggccttgaacgctaactttttgattccgcctgatgaaaatgtttacagtggcaaaactgtggctgagatttgtagtgattcactcaaggatttcaaccctatggtccgtgtttccgtagagaaaggtgatttgtcaatgcttggcactgatttttttgagcagtttgatgtcgtagttataggctatggttctcgtgctaccaaaaaatatgtcaatgaaaaatgtcggaagttaaagaaacgtgtcgcattctatacagtcgattgtagagactcatgtggtgaaatctttgtggacctccaagattacaagtacacaaagaaaaagcttgaagagatggtggaatgcgaactaaattttccaagttttcaggaagctatatcggtaccatggaaaccgattcctcggagaacagcaaagctctactttgctatgagagtaatagaagtgtttgaagagagtgaagggcgtaaacatggagaatgttcgctactcgatcttgccagagtcttggaaatcaaaaagcaactctgtgaggcaaactctgtgagcgagagccatataccagatattctcttggagagacttatcactggtactactgaattcccgccagtttgtgccattgtgggaggaatattagcacaggaggtgatcaaagcagtatcaggcaaaggagacccgttgaaaaacttcttctactatgatggtgaagatgggaaaggtgtgatggaagacatttccgactcttttacctcttaaaccagtgggccttgatttagtttaaactctataatctctgagattccatgtatatctcaatcgtttgttttttgccttcacattatgaacaaatttaatgcagaatttagtggaggatcagttgtgattttcctccggtaaaatcattttcagttattgacatttgaattgttcaatttcaaatttcaaatattataattcaattcaaagactagctaagttttt

SEQ ID NO: 108381 - protein, 327 aa, Arabidopsis thaliana
  peptide (1)..(327): Ceres Seq. ID no. 13667302
TRNLGMDGEELTEQETALYDRQIRVWGANAQRRLTKAHILVSGIKGTVAEFCKNIVLAGVGSVTLMDDRLANMEALNANFLIPPDENVYSGKTVAEICSDSLKDFNPMVRVSVEKGDLSMLGTDFFEQFDVVVIGYGSRATKKYVNEKCRKLKKRVAFYTVDCRDSCGEIFVDLQDYKYTKKKLEEMVECELNFPSFQEAISVPWKPIPRRTAKLYFAMRVIEVFEESEGRKHGECSLLDLARVLEIKKQLCEANSVSESHIPDILLERLITGTTEFPPVCAIVGGILAQEVIKAVSGKGDPLKNFFYYDGEDGKGVMEDISDSFTS

SEQ ID NO: 108382 - protein, 322 aa, Arabidopsis thaliana; identical to SEQ ID NO: 36030
  peptide (1)..(322): Ceres Seq. ID no. 13667303

SEQ ID NO: 108383 - protein, 262 aa, Arabidopsis thaliana; identical to SEQ ID NO: 36031
  peptide (1)..(262): Ceres Seq. ID no. 13667304

SEQ ID NO: 108384 - DNA, 2127 bp, Arabidopsis thaliana
  misc_feature (1)..(2127): Ceres Seq. ID no. 13667313
  misc_feature (1)..(2127): Ortholog of  Ceres SEQ ID NO 13595870 as cited in SEQ ID NO 62101
  misc_feature (1)..(2127): Ortholog of  Ceres SEQ ID NO 13590241 as cited in SEQ ID NO 63878
  misc_feature (1)..(2127): Ortholog of  Ceres SEQ ID NO 13657939 as cited in SEQ ID NO 66349
tacgtcagggttctactatcttcaatttcatcttcgccgctagctttagctgtagtggacgaaccagcttctccgtctgtcgttatagaatctcaagctgtgaagccatcgacgccatcgccattgttcattcagaacgagatacttaaggctcctagtcctaaatcatcggatctcccagaaggatcacagtggcgatacagcgagtttcttaacgctgtgaagaaagggaaagtcgagagagttagattcagcaaagatggttctgtttgttcagcttactgccgtcgacaatcgccgtgcttcagtcatcgtcccttaactgaccctgaccttattgatatcttggctatgaacggagttgatatatccgtctctgaaggagaatcctcaggcaatgacttgttcactgtcattggaaacttgattttctcgcttttggcctttggtggactcttcttgcttttcaggcgagctcagggaggccctggtggtggtcctggtggcttgggtggtcctatggatttcggacgttctaaatccaagttccaggaagtgcctgagactggtgtatcatttgcagatgttgctggggctgatcaagctaagttggagttacaggaagttgtggatttcttgaagaatcctgataagtacacagccttgggtgctaagattcctaaagggtgtttgcttgttggaccgcctggtacgggtaagacactcctggctagggcggtggctggggaagctggagtgccgttcttctcttgcgcggcctcggagttcgtagagctttttgtgggtgtgggtgcatcgagagttagggatttgttcgagaaggctaagtctaaagccccttgtattgtattcattgatagagttgacgctgtgggtaggcagagaggagctgggatgggaggaggaaatgatgagagagaacagactattaatcagctgttgacagagatggatggattttctggcaactctggtgtgatagttttggcagctacgaataggccggacgttcttgattcggctttgttgaggcctggaaagtttgatcgacaggtcacggtggataggcctgatgtggctggcagagtcaagattcttcaggttcattctagggggaaggcactcggtaaagatgtggactttgacaaggttgccagaaggtcccctggtttcacgggtgctgacttacaaaacctgatgaatgaagcggcgattcttgcggctaggcgtgagcttaaggaaataagcaaggatgaaatctctgatgctcttgagaggatcattgctggacctgagaagaagaatgcagttgtctctgaagagaagaagagacttgttgcataccatgaggctggtcatgctctaggtgggtgctcttatccagaatataatccggttgcaaagatttctatcattcctcgtggccaagctggtgggctcactttttttgctccaagcgaagaaagacttgagtctggattgtacagtaggagctaccttgagaatcaaatggcttgttcacttggcggaagggttgcagaggaggtgatctttggggatgagaatgtgacgactggagcatcaaatgatttcatgcaggtgtctcgtgtggcacgtcaaatgattgagagatttgggttcagcaaaaagattggacaagttgctgttggtggccctggtggaaatcccttcatgggtcaacaaatgtcatcacagaaagattactcaatggcaactgcggatattgtagatgctgaggtgcgagagttagttgagaaggcatacaagagagcaacggagatcataacaactcatattgatatcctacacaagcttgcacagctcctgatcgagaaagaaactgttgcaggtgaagattcatgagtctctttattgacggccaagctgagttgtatatttcttgattcctcaaagttgccattgcttagtgcttacaataccataagctaataagtatattcgtgttcatatgtgtcaccgattcattactttccaatcagtatatttggtgtatattccgttgttttagtgaatctaaatatactttgtaatgcaatgcaatttgtttaaagaaaagtaacttgg

SEQ ID NO: 108385 - protein, 634 aa, Arabidopsis thaliana
  peptide (1)..(634): Ceres Seq. ID no. 13667314
YVRVLLSSISSSPLALAVVDEPASPSVVIESQAVKPSTPSPLFIQNEILKAPSPKSSDLPEGSQWRYSEFLNAVKKGKVERVRFSKDGSVCSAYCRRQSPCFSHRPLTDPDLIDILAMNGVDISVSEGESSGNDLFTVIGNLIFSLLAFGGLFLLFRRAQGGPGGGPGGLGGPMDFGRSKSKFQEVPETGVSFADVAGADQAKLELQEVVDFLKNPDKYTALGAKIPKGCLLVGPPGTGKTLLARAVAGEAGVPFFSCAASEFVELFVGVGASRVRDLFEKAKSKAPCIVFIDRVDAVGRQRGAGMGGGNDEREQTINQLLTEMDGFSGNSGVIVLAATNRPDVLDSALLRPGKFDRQVTVDRPDVAGRVKILQVHSRGKALGKDVDFDKVARRSPGFTGADLQNLMNEAAILAARRELKEISKDEISDALERIIAGPEKKNAVVSEEKKRLVAYHEAGHALGGCSYPEYNPVAKISIIPRGQAGGLTFFAPSEERLESGLYSRSYLENQMACSLGGRVAEEVIFGDENVTTGASNDFMQVSRVARQMIERFGFSKKIGQVAVGGPGGNPFMGQQMSSQKDYSMATADIVDAEVRELVEKAYKRATEIITTHIDILHKLAQLLIEKETVAGEDS

SEQ ID NO: 108386 - protein, 517 aa, Arabidopsis thaliana
  peptide (1)..(517): Ceres Seq. ID no. 13667315
MNGVDISVSEGESSGNDLFTVIGNLIFSLLAFGGLFLLFRRAQGGPGGGPGGLGGPMDFGRSKSKFQEVPETGVSFADVAGADQAKLELQEVVDFLKNPDKYTALGAKIPKGCLLVGPPGTGKTLLARAVAGEAGVPFFSCAASEFVELFVGVGASRVRDLFEKAKSKAPCIVFIDRVDAVGRQRGAGMGGGNDEREQTINQLLTEMDGFSGNSGVIVLAATNRPDVLDSALLRPGKFDRQVTVDRPDVAGRVKILQVHSRGKALGKDVDFDKVARRSPGFTGADLQNLMNEAAILAARRELKEISKDEISDALERIIAGPEKKNAVVSEEKKRLVAYHEAGHALGGCSYPEYNPVAKISIIPRGQAGGLTFFAPSEERLESGLYSRSYLENQMACSLGGRVAEEVIFGDENVTTGASNDFMQVSRVARQMIERFGFSKKIGQVAVGGPGGNPFMGQQMSSQKDYSMATADIVDAEVRELVEKAYKRATEIITTHIDILHKLAQLLIEKETVAGEDS

SEQ ID NO: 108387 - protein, 461 aa, Arabidopsis thaliana
  peptide (1)..(461): Ceres Seq. ID no. 13667316
MDFGRSKSKFQEVPETGVSFADVAGADQAKLELQEVVDFLKNPDKYTALGAKIPKGCLLVGPPGTGKTLLARAVAGEAGVPFFSCAASEFVELFVGVGASRVRDLFEKAKSKAPCIVFIDRVDAVGRQRGAGMGGGNDEREQTINQLLTEMDGFSGNSGVIVLAATNRPDVLDSALLRPGKFDRQVTVDRPDVAGRVKILQVHSRGKALGKDVDFDKVARRSPGFTGADLQNLMNEAAILAARRELKEISKDEISDALERIIAGPEKKNAVVSEEKKRLVAYHEAGHALGGCSYPEYNPVAKISIIPRGQAGGLTFFAPSEERLESGLYSRSYLENQMACSLGGRVAEEVIFGDENVTTGASNDFMQVSRVARQMIERFGFSKKIGQVAVGGPGGNPFMGQQMSSQKDYSMATADIVDAEVRELVEKAYKRATEIITTHIDILHKLAQLLIEKETVAGEDS

SEQ ID NO: 108388 - DNA, 1180 bp, Arabidopsis thaliana
  misc_feature (1)..(1180): Ceres Seq. ID no. 13667333
  misc_feature (1)..(1180): Ortholog of  Ceres SEQ ID NO 13593831 as cited in SEQ ID NO 53828
agggggcccaaaactggacccccccggggggccctcaagactaagggatccccccgggctcagggaataaagaaaaagctcacaactttaacctttctggagagagaagaacaaaagagggagagggagagaaatggaaggcaaagaagaagatgtacgagtgggagctaacaagttcccggagaggcaacccatcggtacatcggctcagtccaccgacaaggactacaaagagccacctcctgcgccactgttcgagcccggcgagctcagctcatggtctttctacagagccggaatagctgagtttatcgctactttcttgtttctctacatcactgttttgactgtaatgggagttaagagagcaccaaacatgtgtgcttctgttggaatccaaggtatcgcttgggcttttggtggcatgatctttgctcttgtctactgtactgctggaatttcaggtggacacatcaaccctgctgtaacattcggtctgttcttggctcggaagttatctctgaccagagcagtgttctacatgattatgcaatgtcttggagccatctgtggtgccggagtcgtcaaaggtttccagccaacgccgtaccagactctcggtggtggtgctaacaccgttgctcatggctacaccaaaggttctggccttggtgctgaaatcatcggaacattcgttctcgtctacactgtcttctccgccaccgacgccaagagaagcgcccgtgactcacacgtcccgattttggcgccgctcccaatcggatttgcagtgttcttggtacacttggcaacaataccgatcaccgggaccggaatcaacccagctagaagtcttggagccgcaattatctacaacaaggaccactcttgggatgaccattggattttctgggttggaccattcattggagcagctctagcagcactatatcaccagattgtcatcagagcgattcctttcaagagcaagagttagagacacacagaaagattccacggtccagaatttgttctttagtagtttctttgcttatctatctaatgtagcttgtgttttgcaatgtaatgagcctttcaagaatatgtatttgggatttctaatcagcttttgtctatgtaaaaaccatggtttatctttaaatgttgtttgaggttggcc

SEQ ID NO: 108389 - protein, 287 aa, Arabidopsis thaliana; identical to SEQ ID NO: 29005
  peptide (1)..(287): Ceres Seq. ID no. 13667334

SEQ ID NO: 108390 - protein, 214 aa, Arabidopsis thaliana; identical to SEQ ID NO: 29006
  peptide (1)..(214): Ceres Seq. ID no. 13667335

SEQ ID NO: 108391 - protein, 206 aa, Arabidopsis thaliana; identical to SEQ ID NO: 29007
  peptide (1)..(206): Ceres Seq. ID no. 13667336

SEQ ID NO: 108392 - DNA, 930 bp, Arabidopsis thaliana
  misc_feature (1)..(930): Ceres Seq. ID no. 13667345
  misc_feature (1)..(930): Ortholog of  Ceres SEQ ID NO 13595093 as cited in SEQ ID NO 56132
  misc_feature (1)..(930): Ortholog of  Ceres SEQ ID NO 13661727 as cited in SEQ ID NO 61376
ccacgcgtccgcactgatccttctctcatcctcagaaagaatggctcaaaccatgctgcttacttcaggcgtcaccgccggccattttttgaggaacaagagccctttggctcagcccaaagttcaccatctcttcctctctggaaactctccggttgcactaccatctaggagacaatcattcgttcctctcgctctcttcaaacccaaaaccaaagctgctcctaaaaaggttgagaagccgaagagcaaggttgaggatggcatctttggaacgtctggtgggattggtttcacaaaggcgaatgagctattcgttggtcgtgttgctatgatcggtttcgctgcatcgttgcttggtgaggcgttgacgggaaaagggatattagctcagctgaatctggagacagggataccgatttacgaagcagagccattgcttctcttcttcatcttgttcactctgttgggagccattggagctctcggagacagaggaaaattcgtcgacgatcctcccaccgggctcgagaaagccgtcattcctcccggcaaaaacgtccgatctgccctcggtctcaaagaacaaggtccattgtttgggttcacgaaggcgaacgagttattcgtaggaagattggcacagttgggaatagcattttcactgataggagagattattaccgggaaaggagcattagctcaactcaacattgagaccggtataccaattcaagatatcgaaccacttgtcctcttaaacgttgctttcttcttcttcgctgccattaatcctggtaatggaaaattcatcaccgatgatggtgaagaaagctaaattatcatgtacttaaatttagtagagagtgtgtgaccttctcttcatgttgagacaaaaggaaatggacagcttaaattgttgtaatactt

SEQ ID NO: 108393 - protein, 278 aa, Arabidopsis thaliana
  peptide (1)..(278): Ceres Seq. ID no. 13667346
HASALILLSSSERMAQTMLLTSGVTAGHFLRNKSPLAQPKVHHLFLSGNSPVALPSRRQSFVPLALFKPKTKAAPKKVEKPKSKVEDGIFGTSGGIGFTKANELFVGRVAMIGFAASLLGEALTGKGILAQLNLETGIPIYEAEPLLLFFILFTLLGAIGALGDRGKFVDDPPTGLEKAVIPPGKNVRSALGLKEQGPLFGFTKANELFVGRLAQLGIAFSLIGEIITGKGALAQLNIETGIPIQDIEPLVLLNVAFFFFAAINPGNGKFITDDGEES

SEQ ID NO: 108394 - protein, 265 aa, Arabidopsis thaliana; identical to SEQ ID NO: 24800
  peptide (1)..(265): Ceres Seq. ID no. 13667347

SEQ ID NO: 108395 - protein, 261 aa, Arabidopsis thaliana; identical to SEQ ID NO: 24801
  peptide (1)..(261): Ceres Seq. ID no. 13667348

SEQ ID NO: 108396 - DNA, 2125 bp, Arabidopsis thaliana
  misc_feature (1)..(2125): Ceres Seq. ID no. 13667359
  misc_feature (1)..(2125): Ortholog of  Ceres SEQ ID NO 14312351 as cited in SEQ ID NO 55278
  misc_feature (1)..(2125): Ortholog of  Ceres SEQ ID NO 13655237 as cited in SEQ ID NO 62892
  misc_feature (1)..(2125): Ortholog of  Ceres SEQ ID NO 13597268 as cited in SEQ ID NO 63929
  misc_feature (1)..(2125): Ortholog of  Ceres SEQ ID NO 13659840 as cited in SEQ ID NO 66970
  misc_feature (1)..(2125): Ortholog of  Ceres SEQ ID NO 13660544 as cited in SEQ ID NO 67401
ggcccgaaggggttcgtatgtcttattactcctctttcttcttccttttcctcttctcctttctcacgagtttcagagtttctgctcaagatcccacttacgtataccacacctgtcaaaatacggcaaattacacaagtaacagcacttacaacaacaatctcaagacccttttggcttctctttcttcccgcaacgcttcctactccaccggattccaaaacgccaccgtcggccaagctccagacagagtcaccggacttttcaactgccgtggagatgtctcaacggaagtttgccgtagatgcgtctcctttgccgtcaacgacaccttaactcggtgtcctaaccagaaagaagccacactttattacgatgagtgtgtacttagatactctaaccagaatattctctcgacactaataaccaccggtggagttatcttggttaacacccggaatgtgacatctaaccaactagacctgttaagtgatttggttttgcctactctgaaccaagccgccaccgtagccttgaacagttccaaaaaattcggtacgagaaaaaacaattttactgcgttgcagagtttctatggactggttcagtgcacacctgatctcacgagacaagactgttcgcgttgtctccaactggtcatcaatcaaatacctactgacagaattggtgcaagaattattaatccgagctgtacttcaagatacgagatctacgcgttttacaccgaatccgccgttccaccaccaccaccaccaccgtcaatttgtactcctccagtttcagctcctccgcgatctggaaaagatgggaattcaaaggtgttagtgatagccattgttgtgcctattatagtggctgttctgctttttatagctggttattgtttccttacaagaagggcaaggaagagttattacacaccatctgcatttgctggagatgatatcacaacagcagactcactacagcttgattatagaacaattcaaactgcaacagatgattttgtagagagtaataagattggtcaaggtggatttggtgaggtttacaagggtactttatcggatgggactgaagttgcggtgaagcgactatcaaagtcatcaggacaaggtgaagtagagttcaagaacgaggttgttcttgttgcaaagctacaacatagaaatctggttagacttcttgggttttgtctagacggagaagaaagagtactggtctacgagtatgtgcccaacaaaagtcttgattacttcctctttgaccctgcaaagaaaggccagctggattggactcgacgatacaagattatcggtggagttgctcgagggattctgtatcttcatcaagactcacgactcacaatcatacaccgtgacctcaaagccagtaacattctcttggacgcggatatgaatcctaaaattgcagattttggaatggctaggatctttggattggaccaaaccgaagagaacacaagcagaatagttggtacctatggttacatgtctcccgagtatgcaatgcatggtcagtactcaatgaaatctgatgtctatagcttcggagtgttagttcttgagattataagtggcaagaagaatagcagcttctaccaaacagatggtgcacatgacttggtctcatatgcttgggggctttggagtaacgggcgaccattagaactcgtggatccagctattgtagaaaattgccaaaggaatgaagttgttcgatgtgtccatatcggtcttttatgtgttcaagaagatcctgctgagcgtccgacgttgtcaaccattgttctgatgctcactagtaacactgtgactttacccgtgccacggcaacccggtcttttctttcagagtagaattggaaaagacccgcttgatacagatacaacgagcaaatctcttctagggtctgttgacgatgcatccatcacagatatacatcctcgatgatgatgagtttttcccttcatacctgattcctgaatctattggtngtttgaaaaataaagttaaaaaacttcttttgntattagaatggtttggaatttgnaaatttgtaacccaccaagccaagtttttaa

SEQ ID NO: 108397 - protein, 663 aa, Arabidopsis thaliana
  peptide (1)..(663): Ceres Seq. ID no. 13667360
PEGVRMSYYSSFFFLFLFSFLTSFRVSAQDPTYVYHTCQNTANYTSNSTYNNNLKTLLASLSSRNASYSTGFQNATVGQAPDRVTGLFNCRGDVSTEVCRRCVSFAVNDTLTRCPNQKEATLYYDECVLRYSNQNILSTLITTGGVILVNTRNVTSNQLDLLSDLVLPTLNQAATVALNSSKKFGTRKNNFTALQSFYGLVQCTPDLTRQDCSRCLQLVINQIPTDRIGARIINPSCTSRYEIYAFYTESAVPPPPPPPSICTPPVSAPPRSGKDGNSKVLVIAIVVPIIVAVLLFIAGYCFLTRRARKSYYTPSAFAGDDITTADSLQLDYRTIQTATDDFVESNKIGQGGFGEVYKGTLSDGTEVAVKRLSKSSGQGEVEFKNEVVLVAKLQHRNLVRLLGFCLDGEERVLVYEYVPNKSLDYFLFDPAKKGQLDWTRRYKIIGGVARGILYLHQDSRLTIIHRDLKASNILLDADMNPKIADFGMARIFGLDQTEENTSRIVGTYGYMSPEYAMHGQYSMKSDVYSFGVLVLEIISGKKNSSFYQTDGAHDLVSYAWGLWSNGRPLELVDPAIVENCQRNEVVRCVHIGLLCVQEDPAERPTLSTIVLMLTSNTVTLPVPRQPGLFFQSRIGKDPLDTDTTSKSLLGSVDDASITDIHPR

SEQ ID NO: 108398 - protein, 658 aa, Arabidopsis thaliana
  peptide (1)..(658): Ceres Seq. ID no. 13667361
MSYYSSFFFLFLFSFLTSFRVSAQDPTYVYHTCQNTANYTSNSTYNNNLKTLLASLSSRNASYSTGFQNATVGQAPDRVTGLFNCRGDVSTEVCRRCVSFAVNDTLTRCPNQKEATLYYDECVLRYSNQNILSTLITTGGVILVNTRNVTSNQLDLLSDLVLPTLNQAATVALNSSKKFGTRKNNFTALQSFYGLVQCTPDLTRQDCSRCLQLVINQIPTDRIGARIINPSCTSRYEIYAFYTESAVPPPPPPPSICTPPVSAPPRSGKDGNSKVLVIAIVVPIIVAVLLFIAGYCFLTRRARKSYYTPSAFAGDDITTADSLQLDYRTIQTATDDFVESNKIGQGGFGEVYKGTLSDGTEVAVKRLSKSSGQGEVEFKNEVVLVAKLQHRNLVRLLGFCLDGEERVLVYEYVPNKSLDYFLFDPAKKGQLDWTRRYKIIGGVARGILYLHQDSRLTIIHRDLKASNILLDADMNPKIADFGMARIFGLDQTEENTSRIVGTYGYMSPEYAMHGQYSMKSDVYSFGVLVLEIISGKKNSSFYQTDGAHDLVSYAWGLWSNGRPLELVDPAIVENCQRNEVVRCVHIGLLCVQEDPAERPTLSTIVLMLTSNTVTLPVPRQPGLFFQSRIGKDPLDTDTTSKSLLGSVDDASITDIHPR

SEQ ID NO: 108399 - DNA, 2958 bp, Arabidopsis thaliana
  misc_feature (1)..(2958): Ceres Seq. ID no. 13667366
  misc_feature (1)..(2958): Ortholog of  Ceres SEQ ID NO 14306268 as cited in SEQ ID NO 51135
  misc_feature (1)..(2958): Ortholog of  Ceres SEQ ID NO 15225368 as cited in SEQ ID NO 58345
  misc_feature (1)..(2958): Ortholog of  Ceres SEQ ID NO 13584744 as cited in SEQ ID NO 69137
gaaagagttgaatatgaccaatttggaaagtgttttaagtaaaggatttgaagtaaaagtgaagatcgatgatacatcatgtcaagaatgtttttcctctcatggaagttgtggtttcaatgaaaccttgtcattgggagccaaatgcagtccactcaatccaacaccaccaccaccaccaactggtaagtttcgtatatatcacaaattcacaatcatttaatatatattttcttgaacaactcgagatatttattaaatctttctcattctgtatacctttttattttatttttaaccctttacttagacatatcaaacaactatagtaagccatgtttataacatattatatatactaaaattattaaatgaaaaatttagtatattcaattgatttaaagggaataattagaaaatttaccttttgccaccaataaaaatttgtgtttgaacatccgatttttctcacaaatttataattatgaatttttaccttctgttatataaaacttatttatattttgacccccataaaaaggatttatgagtccactgtttaagacatttttcatgctctatagtcaatatcatgttcccgcaatatcctcaaatgcgcagcatgattcatgtactaaataggagtttttcaatttttagcttagggaaaaggaatgaaaaaacaaggaacaaaaagtcttgtcaaagtaaactaatactgacatcccaaattagtcttttgtgtcacaatcctcacttaacttggtcttcacgccctttgccgtttccacctcatctttatgcttatcgctctctctttatacatctttttgtttaaatcatttcctcttatctcttctcaacacaaaccaaaaccataaaacacgttgttcatagatctcaaacaaatcatgtactatcctctcagttctagtttgatgttcttcatcctcttctccttattctaccatcttccttgtgattcaagtaagtgtgagagtctgtttcagtgtgggaacatcaccgccagttttcctttctggggaggagatcgtcacaaacattgcggtcatccattgctagagcttcgctgcgaccaaaacaagagtacctctttattcatctcagaccaagagttctatgttctccatgtcgatcaaacatcttacagtcttacactcgccagaccagaccttttagattccttttgctcccttaaattcaccaacacaaccttaccaccagaaattttcgaactttctccggcctacaagagcgtcacattctaccactgttacccggttcttcctgacctttcgaattatacatgtcctgttataggtccaatctcagtgtctggaaaccctgaagatcacgaaacctgctttgccaattttgccgcaaacgttcctaagagtttcgtcacgaaagagaaaaaattgaatataaccaatttggaaagtgttttggaaaaaggatttgaggtgaacatgaatgtcatcatgaaagcatgtcaagaatgttcatactctaatgaatcctgtggcttcgatgaaaactttccatttgaagttaaatgcaaaccacaccattcaccaactgatacaggcctctctcctggagcaaaagcaggcattgcggttgcttctgtatcgggtttggccattcttatactcgcaggtttgttcttatacatcagacggagacggaagactcaggacgctcaatacacaagcaaaagcttgcctatcacatcatactcgagtagagacacatcaagaaatccaacttccacaacaatctcctccagcagcaatcactctcttcttccctcaatctctaaccttgcaaacggaagcgactactgtggagttcaagtctttagctacgaagaacttgaagaagcaactgagaatttctctagagaactcggagatggtggcttcggtactgtctactacggcgtgttgaaagacggacgagctgtagcagtgaaacgactctacgaaagatcactaaaacgtgtagaacaattcaagaacgaaatcgaaatcttgaaatcgctaaaacatccaaacctcgtgatcctctacggatgcacatcaagacacagcagagagcttctactagtctacgaatacatctcaaacggaactctagccgaacatctacacggcaaccgcgcagaagctcgtcctctctgctggtcaacccgattaaacatcgcaatcgaaaccgcaagcgcattatcattcctccacataaaaggaatcatacacagagacatcaagactactaacatactcttagacgataactaccaagtcaaagtcgccgatttcggactttcacggttgtttccaatggatcaaacacacatatcaaccgcaccacaaggcacaccaggctacgtggatccagagtattaccaatgttaccaattaaacgagaagagcgatgtctacagcttcggagtcgtactaacggaactaatctcatcaaaagaagcagtagacattactcgacaccgtcacgatatcaatctagcgaacatggctgtatctaagattcagaacaatgcattacacgagctagtggattcgagtttaggattcgataatgatccagaagttaggaggaagatgatggcggtgtcggaattagcgtttcgatgtttgcaacaagagagagatgttagacctgcgatggatgagattgtggagattttgagagggattaaggatgatgagaagaagcgtgtgttggtgaagtcgccggatgttgtggatattgaatgcggtggtggtgatgatgttggattgttgaggaatagtgttccgccgccgatttcgccggagactgataagtggactagtagttctgatacggcggcgagtttgtaattaggggttactgtaagtggtttttttaaatctggggttaaaaaaaaggattctt

SEQ ID NO: 108400 - protein, 663 aa, Arabidopsis thaliana
  peptide (1)..(663): Ceres Seq. ID no. 13667367
MYYPLSSSLMFFILFSLFYHLPCDSSKCESLFQCGNITASFPFWGGDRHKHCGHPLLELRCDQNKSTSLFISDQEFYVLHVDQTSYSLTLARPDLLDSFCSLKFTNTTLPPEIFELSPAYKSVTFYHCYPVLPDLSNYTCPVIGPISVSGNPEDHETCFANFAANVPKSFVTKEKKLNITNLESVLEKGFEVNMNVIMKACQECSYSNESCGFDENFPFEVKCKPHHSPTDTGLSPGAKAGIAVASVSGLAILILAGLFLYIRRRRKTQDAQYTSKSLPITSYSSRDTSRNPTSTTISSSSNHSLLPSISNLANGSDYCGVQVFSYEELEEATENFSRELGDGGFGTVYYGVLKDGRAVAVKRLYERSLKRVEQFKNEIEILKSLKHPNLVILYGCTSRHSRELLLVYEYISNGTLAEHLHGNRAEARPLCWSTRLNIAIETASALSFLHIKGIIHRDIKTTNILLDDNYQVKVADFGLSRLFPMDQTHISTAPQGTPGYVDPEYYQCYQLNEKSDVYSFGVVLTELISSKEAVDITRHRHDINLANMAVSKIQNNALHELVDSSLGFDNDPEVRRKMMAVSELAFRCLQQERDVRPAMDEIVEILRGIKDDEKKRVLVKSPDVVDIECGGGDDVGLLRNSVPPPISPETDKWTSSSDTAASL

SEQ ID NO: 108401 - protein, 654 aa, Arabidopsis thaliana
  peptide (1)..(654): Ceres Seq. ID no. 13667368
MFFILFSLFYHLPCDSSKCESLFQCGNITASFPFWGGDRHKHCGHPLLELRCDQNKSTSLFISDQEFYVLHVDQTSYSLTLARPDLLDSFCSLKFTNTTLPPEIFELSPAYKSVTFYHCYPVLPDLSNYTCPVIGPISVSGNPEDHETCFANFAANVPKSFVTKEKKLNITNLESVLEKGFEVNMNVIMKACQECSYSNESCGFDENFPFEVKCKPHHSPTDTGLSPGAKAGIAVASVSGLAILILAGLFLYIRRRRKTQDAQYTSKSLPITSYSSRDTSRNPTSTTISSSSNHSLLPSISNLANGSDYCGVQVFSYEELEEATENFSRELGDGGFGTVYYGVLKDGRAVAVKRLYERSLKRVEQFKNEIEILKSLKHPNLVILYGCTSRHSRELLLVYEYISNGTLAEHLHGNRAEARPLCWSTRLNIAIETASALSFLHIKGIIHRDIKTTNILLDDNYQVKVADFGLSRLFPMDQTHISTAPQGTPGYVDPEYYQCYQLNEKSDVYSFGVVLTELISSKEAVDITRHRHDINLANMAVSKIQNNALHELVDSSLGFDNDPEVRRKMMAVSELAFRCLQQERDVRPAMDEIVEILRGIKDDEKKRVLVKSPDVVDIECGGGDDVGLLRNSVPPPISPETDKWTSSSDTAASL

SEQ ID NO: 108402 - protein, 470 aa, Arabidopsis thaliana
  peptide (1)..(470): Ceres Seq. ID no. 13667369
MNVIMKACQECSYSNESCGFDENFPFEVKCKPHHSPTDTGLSPGAKAGIAVASVSGLAILILAGLFLYIRRRRKTQDAQYTSKSLPITSYSSRDTSRNPTSTTISSSSNHSLLPSISNLANGSDYCGVQVFSYEELEEATENFSRELGDGGFGTVYYGVLKDGRAVAVKRLYERSLKRVEQFKNEIEILKSLKHPNLVILYGCTSRHSRELLLVYEYISNGTLAEHLHGNRAEARPLCWSTRLNIAIETASALSFLHIKGIIHRDIKTTNILLDDNYQVKVADFGLSRLFPMDQTHISTAPQGTPGYVDPEYYQCYQLNEKSDVYSFGVVLTELISSKEAVDITRHRHDINLANMAVSKIQNNALHELVDSSLGFDNDPEVRRKMMAVSELAFRCLQQERDVRPAMDEIVEILRGIKDDEKKRVLVKSPDVVDIECGGGDDVGLLRNSVPPPISPETDKWTSSSDTAASL

SEQ ID NO: 108403 - DNA, 1156 bp, Arabidopsis thaliana
  misc_feature (1)..(1156): Ceres Seq. ID no. 13667380
  misc_feature (1)..(1156): Ortholog of  Ceres SEQ ID NO 13657647 as cited in SEQ ID NO 66399
aagatgttgcctaacgaagaacttgttccggtgaagaggattacaccccagtcatcgtggagttggatttccatagacgcgacgggaaaaaaaacggtgcttgacgttgacaaatatgtgattatgcaccgtgttcagatccacgctcgcgatctccggatacttgacccaaatctcttttacccttctgctattctgggtcgagaaagagccattgttcttaacttagagcatatcaaggcgatcatcactgccaaagaggttttgattcaggattcgtcagatgaaaatcttattccaaccctggaggagtttcagacacgcttatctgttggaaacaaggcacacggtggtcaattagatggtgatgtggttgaagaagatgaatccgcgtttgaatttcgggcactagaggttgctttggaagctatttgtagcttcctagctgcaaggacaatagaattagagaagtctgcttatcctgctttggatgaacttaccttgaagttaactagccgtaacttgctaagggtttgtaaattgaagagttccatgacccgattgacagctcaggtccaaaagataaaggatgagcttgaacagttgttggaagatgacgaagatatggctgaactctacctttcaaggaagctcgcgggtgcatcttcaccagctattgattctggtgaacacattaattggtatcctacgtccccaacaataggtgctaagatttccagagcaaagagccatttggtgaggtcagccacggttcgtggggacgacaaaaatgatgttgaagaagttgaaatgttgcttgaggcacactttatgcaaatcgacagaactttgaacaaattaaccgagctacgcgagtatgtggatgagacagaagatttccttaatatccagctagacagtagtcgaaatcagctaattaagttcgaaattattttaaccgctggaagcatctgtgtatcagtgtactctgtagttgttggcattctaggcatgaacattcctttcccgtggaacatcaaaaaacatatgttcaaatgggtggtgagcggcactgcaacagtttgcgcaatcttgttcgtgactataatgtcgttcgctcggtacaaaaagctctttggtttttgacgatggaagg

SEQ ID NO: 108404 - protein, 381 aa, Arabidopsis thaliana
  peptide (1)..(381): Ceres Seq. ID no. 13667381
KMLPNEELVPVKRITPQSSWSWISIDATGKKTVLDVDKYVIMHRVQIHARDLRILDPNLFYPSAILGRERAIVLNLEHIKAIITAKEVLIQDSSDENLIPTLEEFQTRLSVGNKAHGGQLDGDVVEEDESAFEFRALEVALEAICSFLAARTIELEKSAYPALDELTLKLTSRNLLRVCKLKSSMTRLTAQVQKIKDELEQLLEDDEDMAELYLSRKLAGASSPAIDSGEHINWYPTSPTIGAKISRAKSHLVRSATVRGDDKNDVEEVEMLLEAHFMQIDRTLNKLTELREYVDETEDFLNIQLDSSRNQLIKFEIILTAGSICVSVYSVVVGILGMNIPFPWNIKKHMFKWVVSGTATVCAILFVTIMSFARYKKLFGF

SEQ ID NO: 108405 - protein, 380 aa, Arabidopsis thaliana
  peptide (1)..(380): Ceres Seq. ID no. 13667382
MLPNEELVPVKRITPQSSWSWISIDATGKKTVLDVDKYVIMHRVQIHARDLRILDPNLFYPSAILGRERAIVLNLEHIKAIITAKEVLIQDSSDENLIPTLEEFQTRLSVGNKAHGGQLDGDVVEEDESAFEFRALEVALEAICSFLAARTIELEKSAYPALDELTLKLTSRNLLRVCKLKSSMTRLTAQVQKIKDELEQLLEDDEDMAELYLSRKLAGASSPAIDSGEHINWYPTSPTIGAKISRAKSHLVRSATVRGDDKNDVEEVEMLLEAHFMQIDRTLNKLTELREYVDETEDFLNIQLDSSRNQLIKFEIILTAGSICVSVYSVVVGILGMNIPFPWNIKKHMFKWVVSGTATVCAILFVTIMSFARYKKLFGF

SEQ ID NO: 108406 - protein, 340 aa, Arabidopsis thaliana
  peptide (1)..(340): Ceres Seq. ID no. 13667383
MHRVQIHARDLRILDPNLFYPSAILGRERAIVLNLEHIKAIITAKEVLIQDSSDENLIPTLEEFQTRLSVGNKAHGGQLDGDVVEEDESAFEFRALEVALEAICSFLAARTIELEKSAYPALDELTLKLTSRNLLRVCKLKSSMTRLTAQVQKIKDELEQLLEDDEDMAELYLSRKLAGASSPAIDSGEHINWYPTSPTIGAKISRAKSHLVRSATVRGDDKNDVEEVEMLLEAHFMQIDRTLNKLTELREYVDETEDFLNIQLDSSRNQLIKFEIILTAGSICVSVYSVVVGILGMNIPFPWNIKKHMFKWVVSGTATVCAILFVTIMSFARYKKLFGF

SEQ ID NO: 108407 - DNA, 1248 bp, Arabidopsis thaliana
  misc_feature (1)..(1248): Ceres Seq. ID no. 13667384
  misc_feature (1)..(1248): Ortholog of  Ceres SEQ ID NO 13657647 as cited in SEQ ID NO 66399
gatgtcacctgacggagaacttgttccggtggattcatcggcggtggtcacggcgaaaaggaagacatctcagttatcaaggagttggatttccatagacgcgacggggcaaaaaactgtgcttgacgttgataaacacgtgattatgcaccgtgttcagatccacgctcgtgatctccggatccttgacccgaatcttttttacccttctgctattttgggtcgagaaagagccattgttcttaacttagagcatatcaaggcgattatcactgccgaagaggttttgatccgagattcgtcagatgaaaatgttatccccgtcctagaggagtttcagagaagattgcctgtaggaaacgaggaacatggtgctcacggagatggtgatgtgggtgaagaagatgaatccccgtttgaattccgggcgctagaggtggccttggaagctatttgtagttttctagctgcaaggacaacagaactagagaagtctgcctatcctgctttggatgaacttaccttgaagataagtagccgtaacttggaaagagttcgtaaattgaagagtgccatgactcgtttgacagctcgggtccaaaaggtaagggatgagcttgaacagttgttggatgatgatggtgatatggctgatctctaccttacaaggaagcttgttggtgcatcttcatctgtcagcgtttcagatgaacccatttggtatcctacttccccaacaataggttctatgatttccagagcaagtagaatgagtttagccacggttcgtggagacgacgaaaccgatgttgaagagcttgaaatgttgcttgaggcatacttcatgcaaatagacagcactttgaacaaattaaccgagctacgcgagtatattgatgacacagaggattacattaacatccagttagacaatcatcgaaatcagctgattcagttagagctaatgttaagcgcaggaaccgtctgtgtatcagtgtactctatgatcgccggaatattcggcatgaacattcccaacacatggaaccacgaccatggttacattttcaaatgggtcgtaagtctcacgggaacattttgcatagtcttgttcgtgattatactttcgtacgctcggtttagaggactcatcggatcttaatgacaagagaggacaatttggtacatattttatagcagagaatgtgagagcagatcttgttttttggggtctcttctcgccagcat

SEQ ID NO: 108408 - protein, 386 aa, Arabidopsis thaliana
  peptide (1)..(386): Ceres Seq. ID no. 13667385
MSPDGELVPVDSSAVVTAKRKTSQLSRSWISIDATGQKTVLDVDKHVIMHRVQIHARDLRILDPNLFYPSAILGRERAIVLNLEHIKAIITAEEVLIRDSSDENVIPVLEEFQRRLPVGNEEHGAHGDGDVGEEDESPFEFRALEVALEAICSFLAARTTELEKSAYPALDELTLKISSRNLERVRKLKSAMTRLTARVQKVRDELEQLLDDDGDMADLYLTRKLVGASSSVSVSDEPIWYPTSPTIGSMISRASRMSLATVRGDDETDVEELEMLLEAYFMQIDSTLNKLTELREYIDDTEDYINIQLDNHRNQLIQLELMLSAGTVCVSVYSMIAGIFGMNIPNTWNHDHGYIFKWVVSLTGTFCIVLFVIILSYARFRGLIGS

SEQ ID NO: 108409 - protein, 338 aa, Arabidopsis thaliana
  peptide (1)..(338): Ceres Seq. ID no. 13667386
MHRVQIHARDLRILDPNLFYPSAILGRERAIVLNLEHIKAIITAEEVLIRDSSDENVIPVLEEFQRRLPVGNEEHGAHGDGDVGEEDESPFEFRALEVALEAICSFLAARTTELEKSAYPALDELTLKISSRNLERVRKLKSAMTRLTARVQKVRDELEQLLDDDGDMADLYLTRKLVGASSSVSVSDEPIWYPTSPTIGSMISRASRMSLATVRGDDETDVEELEMLLEAYFMQIDSTLNKLTELREYIDDTEDYINIQLDNHRNQLIQLELMLSAGTVCVSVYSMIAGIFGMNIPNTWNHDHGYIFKWVVSLTGTFCIVLFVIILSYARFRGLIGS

SEQ ID NO: 108410 - protein, 195 aa, Arabidopsis thaliana
  peptide (1)..(195): Ceres Seq. ID no. 13667387
MTRLTARVQKVRDELEQLLDDDGDMADLYLTRKLVGASSSVSVSDEPIWYPTSPTIGSMISRASRMSLATVRGDDETDVEELEMLLEAYFMQIDSTLNKLTELREYIDDTEDYINIQLDNHRNQLIQLELMLSAGTVCVSVYSMIAGIFGMNIPNTWNHDHGYIFKWVVSLTGTFCIVLFVIILSYARFRGLIGS

SEQ ID NO: 108411 - DNA, 2129 bp, Arabidopsis thaliana
  misc_feature (1)..(2129): Ceres Seq. ID no. 13667403
  misc_feature (1)..(2129): Ortholog of  Ceres SEQ ID NO 14312180 as cited in SEQ ID NO 59480
cttctctcttttatcttacgactctcacttcttatctcaaatctacttcaactctatttccagtctccacattttcccacaaatttcaactcttgttctcttcctccaaagtaaaaaacaaaacactgcaagtgaggtttggttttggtgttatagaattatgaagagcgggaagcaatcttcgcaacctgaaaagggtacttccaggatcttgtcactgactgtcctgtttatcgcattttgcggtttctccttctacctcggtggtatattttgctctgagagagacaagattgtagccaaggatgtcacaaggacgactacaaaggctgtagcttcccctaaagaacctacagctactcctattcaaatcaaatccgtttctttcccggagtgcgggtcagagttccaagattacaccccgtgcaccgatccaaagaggtggaagaagtatggtgtccatcgcttaagtttcttggagcgtcattgtcctccggtatatgaaaagaatgagtgtttgattccaccaccagacgggtataaaccgcctataagatggcccaagagccgagaacagtgttggtacaggaacgtgccttatgattggatcaataagcaaaagtctaaccagcattggcttaagaaagaaggagataagttccatttccctggtggtggtaccatgttccctcgtggagttagtcactatgttgatttgatgcaagatctgattcctgaaatgaaagacggaacagtcaggaccgccattgatactggctgtggggttgcgagctggggaggcgatcttttggaccgtgggatactatcactctctcttgctccaagagataaccatgaagctcaggttcaatttgctcttgaacgtggaattcctgcgattctcgggatcatctctacgcaacgtctcccttttccttcaaatgcatttgatatggctcattgttcaagatgtcttattccctggacagaatttggtggaatctatttacttgagattcaccgtatagttcgacctggaggtttttgggttctttctggtccacctgtgaactataatagacgatggcgtggatggaacacaaccatggaagatcagaaatctgactacaacaagcttcagtcacttctaacctccatgtgtttcaaaaagtacgctcaaaaagatgacatagccgtgtggcagaaactctcagacaaatcttgctatgacaaaatcgctaagaacatggaagcttaccctcccaaatgtgacgacagtatagaacctgattctgcttggtacactccactccgtccttgcgtggttgccccgacacctaaagtcaagaagtctggtctcggatcaatcccaaaatggcccgagaggttacatgtcgcgcccgagagaatcggtgatgttcacggaagggaagtgccgaacagtttgaaacacgatgatggtaaatggaagaacagagttaagcattacaagaaagttttaccagctcttgggacagacaagataagaaatgttatggatatgaacactgtttatgaaggtttctctgcggccctcattgaggatcccatttgggtcatgaacgttgtatcatcgtacagcgcaaattcgcttcctgttgtctttgatcgcggtctcatcgggacttaccacgactggtgcgaagctttctcaacgtatccaagaacatatgatcttcttcacctcgacagtctttttaccttggagagtcacaggtgtgagatgaagtacattttgctagagatggacaggatcttgcggccgagtggatatgttataatccgagaatcgagttatttcatggacgcaatcacaacgttagcgaaagggataaggtggagttgccggagagaggagactgagtatgcagtcaaaagtgagaagattctggtttgccagaaaaagctatggttttcgtcaaaccaaacctcttgatgagaccacctgtatcatagtgtttatcatctcctgtgatgcacactacagagagaaggatctagtcctttgagtccaagatatagctctataaacaatctcctttttttgttctctttaatttcttgggtatttcacgggcggccgcgaattc

SEQ ID NO: 108412 - protein, 657 aa, Arabidopsis thaliana
  peptide (1)..(657): Ceres Seq. ID no. 13667404
FSLLSYDSHFLSQIYFNSISSLHIFPQISTLVLFLQSKKQNTASEVWFWCYRIMKSGKQSSQPEKGTSRILSLTVLFIAFCGFSFYLGGIFCSERDKIVAKDVTRTTTKAVASPKEPTATPIQIKSVSFPECGSEFQDYTPCTDPKRWKKYGVHRLSFLERHCPPVYEKNECLIPPPDGYKPPIRWPKSREQCWYRNVPYDWINKQKSNQHWLKKEGDKFHFPGGGTMFPRGVSHYVDLMQDLIPEMKDGTVRTAIDTGCGVASWGGDLLDRGILSLSLAPRDNHEAQVQFALERGIPAILGIISTQRLPFPSNAFDMAHCSRCLIPWTEFGGIYLLEIHRIVRPGGFWVLSGPPVNYNRRWRGWNTTMEDQKSDYNKLQSLLTSMCFKKYAQKDDIAVWQKLSDKSCYDKIAKNMEAYPPKCDDSIEPDSAWYTPLRPCVVAPTPKVKKSGLGSIPKWPERLHVAPERIGDVHGREVPNSLKHDDGKWKNRVKHYKKVLPALGTDKIRNVMDMNTVYEGFSAALIEDPIWVMNVVSSYSANSLPVVFDRGLIGTYHDWCEAFSTYPRTYDLLHLDSLFTLESHRCEMKYILLEMDRILRPSGYVIIRESSYFMDAITTLAKGIRWSCRREETEYAVKSEKILVCQKKLWFSSNQTS

SEQ ID NO: 108413 - protein, 604 aa, Arabidopsis thaliana
  peptide (1)..(604): Ceres Seq. ID no. 13667405
MKSGKQSSQPEKGTSRILSLTVLFIAFCGFSFYLGGIFCSERDKIVAKDVTRTTTKAVASPKEPTATPIQIKSVSFPECGSEFQDYTPCTDPKRWKKYGVHRLSFLERHCPPVYEKNECLIPPPDGYKPPIRWPKSREQCWYRNVPYDWINKQKSNQHWLKKEGDKFHFPGGGTMFPRGVSHYVDLMQDLIPEMKDGTVRTAIDTGCGVASWGGDLLDRGILSLSLAPRDNHEAQVQFALERGIPAILGIISTQRLPFPSNAFDMAHCSRCLIPWTEFGGIYLLEIHRIVRPGGFWVLSGPPVNYNRRWRGWNTTMEDQKSDYNKLQSLLTSMCFKKYAQKDDIAVWQKLSDKSCYDKIAKNMEAYPPKCDDSIEPDSAWYTPLRPCVVAPTPKVKKSGLGSIPKWPERLHVAPERIGDVHGREVPNSLKHDDGKWKNRVKHYKKVLPALGTDKIRNVMDMNTVYEGFSAALIEDPIWVMNVVSSYSANSLPVVFDRGLIGTYHDWCEAFSTYPRTYDLLHLDSLFTLESHRCEMKYILLEMDRILRPSGYVIIRESSYFMDAITTLAKGIRWSCRREETEYAVKSEKILVCQKKLWFSSNQTS

SEQ ID NO: 108414 - protein, 430 aa, Arabidopsis thaliana
  peptide (1)..(430): Ceres Seq. ID no. 13667406
MFPRGVSHYVDLMQDLIPEMKDGTVRTAIDTGCGVASWGGDLLDRGILSLSLAPRDNHEAQVQFALERGIPAILGIISTQRLPFPSNAFDMAHCSRCLIPWTEFGGIYLLEIHRIVRPGGFWVLSGPPVNYNRRWRGWNTTMEDQKSDYNKLQSLLTSMCFKKYAQKDDIAVWQKLSDKSCYDKIAKNMEAYPPKCDDSIEPDSAWYTPLRPCVVAPTPKVKKSGLGSIPKWPERLHVAPERIGDVHGREVPNSLKHDDGKWKNRVKHYKKVLPALGTDKIRNVMDMNTVYEGFSAALIEDPIWVMNVVSSYSANSLPVVFDRGLIGTYHDWCEAFSTYPRTYDLLHLDSLFTLESHRCEMKYILLEMDRILRPSGYVIIRESSYFMDAITTLAKGIRWSCRREETEYAVKSEKILVCQKKLWFSSNQTS

SEQ ID NO: 108415 - DNA, 1490 bp, Arabidopsis thaliana
  misc_feature (1)..(1490): Ceres Seq. ID no. 13667407
  misc_feature (1)..(1490): Ortholog of  Ceres SEQ ID NO 14314792 as cited in SEQ ID NO 56837
acgcgtccgacgcttcgtcgccggccgatttctcccagactcgtcttaccgcctccggtcgaaaccctagattcccggaggacgaaattcgttttttcgccggaactaaattaaggagatttgagaggctatgggtacaacaacgacaacaagcgctgtgtatatccatgttatcgaggatgtcgtcaacaaagttcgtgaggagttcattaacaacggaggtcctggcgagagtgttctcagcgagcttcaaggaatttgggagacgaagatgatgcaagccggagtcttgaatggaccaatagagaggtcatcggctcagaagccaacacctggtggtccactgactcatgatttgaatgttccttatgaaggtacagaggagtacgagactcccactgctgaaatgctcttccctcctacaccattgcagactccccttccaacgccgcttcccggtactgctgataactcatccatgtataacatccctaccggctcaagtgattatcccactcctggaactgagaatggagtcaacattgatgttaaagcaagacctagtccttatatgccaccgccttctccgtggacaaatcctagacttgatgtcaatgttgcttatgtggatggccgtgatgagcctgagagaggaaactctaaccagcagtttacgcaggatttatttgtgccatcctctgggaaacgaaaacgtgatgattcttctggacattatcaaaatggtggatctatacctcaacaggatggtgcaggcgatgctatccctgaggccaaactttgagtgtgatgcattccgcataacctctattggcgatagaaaggtaccacgagacttcttcagctcatcatcgaagattcctcaggttgatgggccaatgcctgacccttatgatgaaatgctctctacaccaaatatatatagttatcaaggacccagtgaagagtttaacgaggccagaactcctgctccaaacgagtaccaaacgagcactcctgttgctgtacaaaacgatatcattgaagatgatgaagagctgttgaacgaagatgatgatgatgacgagttggacgacctagaaagtggcgaggatatgaacacacaacacctggttttagctcaatttgacaaggtgacgcgcacaaagagcaggtggaagtgcagtctgaaagacgggatcatgcatataaacgataaggacattctcttcaacaaagcagcaggcgagtttgacttctgatcttaacactagcaatgatgcttctaggaaagtccttcaaatgtccagtgtctttctttttaccttatgatttaagaccgaccgagagagacatgagtattcatgggaaagtgtactctggttggcttgttgtacaaaaagaaaagttttttctgtcgaagaaggcgtatcaactttcaccttgtttcatgaactcttattgtctttcacgcaatggaaaattaacttccc

SEQ ID NO: 108416 - protein, 299 aa, Arabidopsis thaliana
  peptide (1)..(299): Ceres Seq. ID no. 13667408
MFLMKVQRSTRLPLLKCSSLLHHCRLPFQRRFPVLLITHPCITSLPAQVIIPLLELRMESTLMLKQDLVLICHRLLRGQILDLMSMLLMWMAVMSLREETLTSSLRRIYLCHPLGNENVMILLDIIKMVDLYLNRMVQAMLSLRPNFECDAFRITSIGDRKVPRDFFSSSSKIPQVDGPMPDPYDEMLSTPNIYSYQGPSEEFNEARTPAPNEYQTSTPVAVQNDIIEDDEELLNEDDDDDELDDLESGEDMNTQHLVLAQFDKVTRTKSRWKCSLKDGIMHINDKDILFNKAAGEFDF

SEQ ID NO: 108417 - protein, 296 aa, Arabidopsis thaliana
  peptide (1)..(296): Ceres Seq. ID no. 13667409
MKVQRSTRLPLLKCSSLLHHCRLPFQRRFPVLLITHPCITSLPAQVIIPLLELRMESTLMLKQDLVLICHRLLRGQILDLMSMLLMWMAVMSLREETLTSSLRRIYLCHPLGNENVMILLDIIKMVDLYLNRMVQAMLSLRPNFECDAFRITSIGDRKVPRDFFSSSSKIPQVDGPMPDPYDEMLSTPNIYSYQGPSEEFNEARTPAPNEYQTSTPVAVQNDIIEDDEELLNEDDDDDELDDLESGEDMNTQHLVLAQFDKVTRTKSRWKCSLKDGIMHINDKDILFNKAAGEFDF

SEQ ID NO: 108418 - protein, 242 aa, Arabidopsis thaliana
  peptide (1)..(242): Ceres Seq. ID no. 13667410
MESTLMLKQDLVLICHRLLRGQILDLMSMLLMWMAVMSLREETLTSSLRRIYLCHPLGNENVMILLDIIKMVDLYLNRMVQAMLSLRPNFECDAFRITSIGDRKVPRDFFSSSSKIPQVDGPMPDPYDEMLSTPNIYSYQGPSEEFNEARTPAPNEYQTSTPVAVQNDIIEDDEELLNEDDDDDELDDLESGEDMNTQHLVLAQFDKVTRTKSRWKCSLKDGIMHINDKDILFNKAAGEFDF

SEQ ID NO: 108419 - DNA, 1846 bp, Arabidopsis thaliana
  misc_feature (1)..(1846): Ceres Seq. ID no. 13667411
  misc_feature (1)..(1846): Ortholog of  Ceres SEQ ID NO 13597376 as cited in SEQ ID NO 64002
  misc_feature (1)..(1846): Ortholog of  Ceres SEQ ID NO 13503573 as cited in SEQ ID NO 65402
  misc_feature (1)..(1846): Ortholog of  Ceres SEQ ID NO 13659615 as cited in SEQ ID NO 67248
tctttctctctttcatcgccctcaccggaacgcgcctactctctttccacatcgtacgtttcctctctctaaattcttcaactttaaaggtgataaaaattgaatctttcccacaacccacaagaaaattcgaatcctttctctctttctatctcttagtcacgctttcgatcagcaatctcctcgaattctggttggttccgtctctgttttctgtacacaaagccctgctgctgttgatacacgtgagccgccattaatgcccctttgttttcttcttccagctgatttaggaagttggtgatcaaattacatctagtgtttgtttccgccagctgaagtgaatcaaaatgtttagttttggccgagcaagaagccaagggaggcaaaacagatctatgtctcttggaggactggattatgcagaccccaagaagaaaaacaattacttgggaaagattcttttgacagcttctcttacagccttgtgcattttcatgctcaagcaatctccaacattcaatactcctagcgtgttttctcgacatgagccaggggttacacatgttttggtcactggtggtgctgggtatattggttcacatgcagctctaaggcttctaaaggaatcatatcgagtgaccattgtggacaatctatcacggggcaatctcgctgcagtcaggattttgcaagaactatttccggaacctggaaggcttcaatttatttatgctgatcttggagatgccaaagctgtcaacaagatattcacagagaatgcctttgacgctgtgatgcatttcgctgctggtgcatatgttggggaaagcacacaattccctcttaagtattatcacaatattacatcgaacactttggtagtattagagacaatggctgctcatggagtaaagactttgatatattcaagcacttgtgcaacgtatggggagcctgatattatgccaattacagaggaaactcctcaggtgccaatcaacccatatggtaaggccaagaagatggcagaagatatcattttggatttctcgaaaaactcagatatggcagttatgatcctaagatatttcaatgtgattgggtccgatccagagggcagattgggtgaagccccaagacctgagctgcgagagcatggacgcatctccggtgcttgttttgatgcagcacgtggcatcatgcctggcctacagatcaaaggaacagactacaaaaccgctgatggaacttgcgtacgggattacattgatgtcactgatttggttgatgctcatgttaaagctcttcaaaaggcaaaaccacgcaaagttggaatctacaatgttggcaccgggaaaggtagctcggtgaaagagtttgttgaggcgtgcaagaaagcaactggtgttgagatcaagatcgactatttgcctagacgtgcaggtgattacgctgaggtttacagtgatccaagcaagattaggaaggaacttaactggacagctaagcacactaatctcaaagagagtcttgagactgcatggagatggcagaagctgcaccgtaatggctatggcttaacaacctcatcggtctcggtttactgactttgttcattcctttggtgatggacggagattttgattccagatggtattgaggagagaagcgtaggagatgatgatggtttatatataaatataacacaagatatattatccatattatgaaaaaatgatatcacatgaccagatttttgattgatattcattttgnaatggctttangttcttttaaggaaccagcccatttcattangtatatggtaccctttttacaaatt

SEQ ID NO: 108420 - protein, 419 aa, Arabidopsis thaliana
  peptide (1)..(419): Ceres Seq. ID no. 13667412
MFSFGRARSQGRQNRSMSLGGLDYADPKKKNNYLGKILLTASLTALCIFMLKQSPTFNTPSVFSRHEPGVTHVLVTGGAGYIGSHAALRLLKESYRVTIVDNLSRGNLAAVRILQELFPEPGRLQFIYADLGDAKAVNKIFTENAFDAVMHFAAGAYVGESTQFPLKYYHNITSNTLVVLETMAAHGVKTLIYSSTCATYGEPDIMPITEETPQVPINPYGKAKKMAEDIILDFSKNSDMAVMILRYFNVIGSDPEGRLGEAPRPELREHGRISGACFDAARGIMPGLQIKGTDYKTADGTCVRDYIDVTDLVDAHVKALQKAKPRKVGIYNVGTGKGSSVKEFVEACKKATGVEIKIDYLPRRAGDYAEVYSDPSKIRKELNWTAKHTNLKESLETAWRWQKLHRNGYGLTTSSVSVY

SEQ ID NO: 108421 - protein, 403 aa, Arabidopsis thaliana
  peptide (1)..(403): Ceres Seq. ID no. 13667413
MSLGGLDYADPKKKNNYLGKILLTASLTALCIFMLKQSPTFNTPSVFSRHEPGVTHVLVTGGAGYIGSHAALRLLKESYRVTIVDNLSRGNLAAVRILQELFPEPGRLQFIYADLGDAKAVNKIFTENAFDAVMHFAAGAYVGESTQFPLKYYHNITSNTLVVLETMAAHGVKTLIYSSTCATYGEPDIMPITEETPQVPINPYGKAKKMAEDIILDFSKNSDMAVMILRYFNVIGSDPEGRLGEAPRPELREHGRISGACFDAARGIMPGLQIKGTDYKTADGTCVRDYIDVTDLVDAHVKALQKAKPRKVGIYNVGTGKGSSVKEFVEACKKATGVEIKIDYLPRRAGDYAEVYSDPSKIRKELNWTAKHTNLKESLETAWRWQKLHRNGYGLTTSSVSVY

SEQ ID NO: 108422 - protein, 370 aa, Arabidopsis thaliana
  peptide (1)..(370): Ceres Seq. ID no. 13667414
MLKQSPTFNTPSVFSRHEPGVTHVLVTGGAGYIGSHAALRLLKESYRVTIVDNLSRGNLAAVRILQELFPEPGRLQFIYADLGDAKAVNKIFTENAFDAVMHFAAGAYVGESTQFPLKYYHNITSNTLVVLETMAAHGVKTLIYSSTCATYGEPDIMPITEETPQVPINPYGKAKKMAEDIILDFSKNSDMAVMILRYFNVIGSDPEGRLGEAPRPELREHGRISGACFDAARGIMPGLQIKGTDYKTADGTCVRDYIDVTDLVDAHVKALQKAKPRKVGIYNVGTGKGSSVKEFVEACKKATGVEIKIDYLPRRAGDYAEVYSDPSKIRKELNWTAKHTNLKESLETAWRWQKLHRNGYGLTTSSVSVY

SEQ ID NO: 108423 - DNA, 784 bp, Arabidopsis thaliana
  misc_feature (1)..(784): Ceres Seq. ID no. 13667415
  misc_feature (1)..(784): Ortholog of  Ceres SEQ ID NO 14314442 as cited in SEQ ID NO 52358
  misc_feature (1)..(784): Ortholog of  Ceres SEQ ID NO 12610442 as cited in SEQ ID NO 56281
  misc_feature (1)..(784): Ortholog of  Ceres SEQ ID NO 12610713 as cited in SEQ ID NO 56591
  misc_feature (1)..(784): Ortholog of  Ceres SEQ ID NO 12587345 as cited in SEQ ID NO 62844
  misc_feature (1)..(784): Ortholog of  Ceres SEQ ID NO 13597357 as cited in SEQ ID NO 68961
  misc_feature (1)..(784): Ortholog of  Ceres SEQ ID NO 13587656 as cited in SEQ ID NO 0
  misc_feature (1)..(784): Ortholog of  Ceres SEQ ID NO 14309353 as cited in SEQ ID NO 0
ttttgctcaggttgttctgtggactagatgggatctactgtatgtttctagggagattgaataatctctgtacattgaatcgacaatacggtttatctgggaagaactcaaacgaggcaatgtttgtgatcgaagcttatcgaacacttcgtgatcgtggtccttacccagcagatcaagttcttagaggtcttgagggaagcttcgctttcgttgtctacgatactcaaacttcctctgttttctcagctctgagttctgatggaggaaaaagtctttactggggaatttctggagacggatctgttgtaatgtctgatgatattcagatcataaagcaaggctgtgctaaatcgtttgctcctttccctaatggtaaaccaaaacttaagtttttcattagccctataaagaaagaaacatacttttgagtttagatcttgatgtgtgttttgtgtttttgttattgcaggatgtatgtttcatagtgagacagggcttaagagctttgaccatccgactaatatgatgaaggcaatgccgaggattgatagtaaaggtgttctttgtggagctagtttcaaagttgatgcttgttctaagatcaatagtatccctagaagaggaagtgaagctaactgggcgctggctaattctcgttgattttgcttctagtttcgttaactcttgcttctttgttgcgttttctttttatgtactcttgtttatgtaaatatagccttatgaagacgataaagaaataaaattgatttgcttcttcgtg

SEQ ID NO: 108424 - protein, 142 aa, Arabidopsis thaliana
  peptide (1)..(142): Ceres Seq. ID no. 13667416
LLRLFCGLDGIYCMFLGRLNNLCTLNRQYGLSGKNSNEAMFVIEAYRTLRDRGPYPADQVLRGLEGSFAFVVYDTQTSSVFSALSSDGGKSLYWGISGDGSVVMSDDIQIIKQGCAKSFAPFPNGKPKLKFFISPIKKETYF

SEQ ID NO: 108425 - protein, 129 aa, Arabidopsis thaliana
  peptide (1)..(129): Ceres Seq. ID no. 13667417
MFLGRLNNLCTLNRQYGLSGKNSNEAMFVIEAYRTLRDRGPYPADQVLRGLEGSFAFVVYDTQTSSVFSALSSDGGKSLYWGISGDGSVVMSDDIQIIKQGCAKSFAPFPNGKPKLKFFISPIKKETYF

SEQ ID NO: 108426 - protein, 103 aa, Arabidopsis thaliana
  peptide (1)..(103): Ceres Seq. ID no. 13667418
MFVIEAYRTLRDRGPYPADQVLRGLEGSFAFVVYDTQTSSVFSALSSDGGKSLYWGISGDGSVVMSDDIQIIKQGCAKSFAPFPNGKPKLKFFISPIKKETYF

SEQ ID NO: 108427 - DNA, 897 bp, Arabidopsis thaliana
  misc_feature (1)..(897): Ceres Seq. ID no. 13667439
  misc_feature (1)..(897): Ortholog of  Ceres SEQ ID NO 14313170 as cited in SEQ ID NO 20674
gtatgtgttaaagagtgaatggagctgtggacagaagctagagccttaaaggcaagtctaagaggagaatctactatatctctcaaacatcaccaagtgattgtgtcggaagatttaagccgaacttcttccttgccggaagatttctccgttgagtgtttcctcgatttctcagaaggtcaaaaagaagaagaagaagaagttgtctctgtttcttcttcacaagagcaagaagaacaagaacatgattgtgtctttagttcacaaccttgcatctttgatcaacttccttctttgccggatgaagatgtggaagagcttgaatgggtatctcgtgttgtggatgattgttcatcaccagaagtttcacttctcttaacacaaacacataaaaccaaaccaagcttctcaagaattccggttaaaccaagaaccaaacggtctcggaacagtttaaccggtagtcgtgtttggccactcgtttcaaccaatcatcaacatgcagcaacagagcagttgaggaagaagaaacaagaaactgtccttgtgtttcaacgaagatgcagccattgtggcacaaacaacacaccacagtggagaaccggtccggtcggtccaaaaaccttatgtaatgcatgtggagtccggtttaagtctggtaggctctgcccggaatacagaccggcggatagtccgacgttctcgaatgagattcactcaaatcttcataggaaggttctggaattaagaaagagtaaagagttgggtgaagaaacaggtgaagctagtactaaatcagacccagtcaaatttggcagcaagtggtagataagacttaggtaaaacctactttttgtaacattatctgtagtgttgtaatttaacaacttgcttctt

SEQ ID NO: 108428 - protein, 269 aa, Arabidopsis thaliana; identical to SEQ ID NO: 80584
  peptide (1)..(269): Ceres Seq. ID no. 13667440

SEQ ID NO: 108429 - DNA, 2108 bp, Arabidopsis thaliana
  misc_feature (1)..(2108): Ceres Seq. ID no. 13667452
  misc_feature (1)..(2108): Ortholog of  Ceres SEQ ID NO 15177478 as cited in SEQ ID NO 1121
ccctccaaatctttcaagtatcccatgaacaaaagaaacccgaaaaggaagaatccacctgaagagctccctccaccgcctccgccaccaccaccaccaccatcatcccgaggtgggaacccgtttccaccgtcatcaagctttggggatttaacttttccatgagtaggagcttgtgtgattgttggtgattgccgtgtaacggtctgtgtttgtccttgactgcattttgaattcagcgcagagttacatgcaaagactggtcttttattcttagagacgacaactggttgcactgcatcctggagagaagggaatttactttggctccaaggctggcgttgcatagaaacgcttgtaggataacgcctttgagagtttccattactcgtaaaagatttctcacgaggagcgaggtacaccgatgtttgtgtaccaatacacaatgatggattcattaccggcataactacaaacagcaacaaaacaataatctttaacctatttcacaagggagaaaaataaaaataaaaatcaatttctcataaatcgaatagagaaaaaaattatggattcatcaattttgaaattcgattaatgataaaaacccatagagatttggatcaaagcaggtagatttttttgtcgaggaaaaatttgggattttgagaagataaacaccttagcaaattcaaagaagaatatatcaaacatcttttgttttctctgataatgtcgggagcatcttctgtttcttctgtttcttctatttgttcctctaatgtatcattgatccctacgggacctcaagtgttcatcaatttccgggggaaagatttacgaaaaggcttcatgagctttcttacgcctgctttgaaaaaagaaaagatcaacgtgtttatagacgaacaagaggagaggggcaaatacctaatcagtctttttgatacgataggtgagtcaaaaatcgctttggttatcttttctgaaggatactgcgagtcacgctggtgtatggacgagctggtacaaatcaaggaatacatggatcaaaacagactcgtaatcattccaatattctacaggattgatctcgatgtggtcaaacatcttaaaggaaaattcggcaataatttcttggatttggtagataaatatcatcccgaaccaaaaaaactccaaaaatggatggaagctttgttctctgtttgcgagttgttttccttgattttgccaaaaaacagtgacatttcggatagagattttgtaaagtcaatcgtcaaggcggttaaaaaagtgcagcggaatttctcccaagaaagaaatggagtaaatgaatatcaagatttctcagtccctccaagtaaactcactatcactatgcatgagtcaccaaatgaggaagccgttcaagttacggtgctaaatgaattttaccagatgaagaatcagtcaccagtgccatcatacgagttcaaattttgggtcgaccttactagaccaaagggtaacgttttcatgattgacgcaagagatctttccattgcatggtcagaggactccaaccattggacctggctcactctcgcaaaccaaaattcaaatgaatcagtgatggaaattgcatttttgaaaagtgctagctggctagacgtagctggaaagtttgacactcgatatttgaccccgaggacaaggtacgaggtggtgttcgtagtgaagttagaatacacattcgaatgggagacactagtgaagctaaagctagacttgccgaatacttgggagaaaccgcaagaacagaatgtggacatgtttgactacataagtgaccaatggctcgatattccagttggagagttcaccacatcgaagaaaaacgtcggggaaatctcttttgcaatgtacgaacacgagtgccaactgtggaagtcagggctcttcgtcaaaggtgttacaattcgtcccaaatactaagtcatttataagcatgtatgttgttggtctgagatatatatagtggaaatgctcgctttgaaccataatcttagtttcacctcccaaatgtttgttacaatgttacttgtgtagatagtttgaccggtttc

SEQ ID NO: 108430 - protein, 414 aa, Arabidopsis thaliana
  peptide (1)..(414): Ceres Seq. ID no. 13667453
MSGASSVSSVSSICSSNVSLIPTGPQVFINFRGKDLRKGFMSFLTPALKKEKINVFIDEQEERGKYLISLFDTIGESKIALVIFSEGYCESRWCMDELVQIKEYMDQNRLVIIPIFYRIDLDVVKHLKGKFGNNFLDLVDKYHPEPKKLQKWMEALFSVCELFSLILPKNSDISDRDFVKSIVKAVKKVQRNFSQERNGVNEYQDFSVPPSKLTITMHESPNEEAVQVTVLNEFYQMKNQSPVPSYEFKFWVDLTRPKGNVFMIDARDLSIAWSEDSNHWTWLTLANQNSNESVMEIAFLKSASWLDVAGKFDTRYLTPRTRYEVVFVVKLEYTFEWETLVKLKLDLPNTWEKPQEQNVDMFDYISDQWLDIPVGEFTTSKKNVGEISFAMYEHECQLWKSGLFVKGVTIRPKY

SEQ ID NO: 108431 - protein, 374 aa, Arabidopsis thaliana
  peptide (1)..(374): Ceres Seq. ID no. 13667454
MSFLTPALKKEKINVFIDEQEERGKYLISLFDTIGESKIALVIFSEGYCESRWCMDELVQIKEYMDQNRLVIIPIFYRIDLDVVKHLKGKFGNNFLDLVDKYHPEPKKLQKWMEALFSVCELFSLILPKNSDISDRDFVKSIVKAVKKVQRNFSQERNGVNEYQDFSVPPSKLTITMHESPNEEAVQVTVLNEFYQMKNQSPVPSYEFKFWVDLTRPKGNVFMIDARDLSIAWSEDSNHWTWLTLANQNSNESVMEIAFLKSASWLDVAGKFDTRYLTPRTRYEVVFVVKLEYTFEWETLVKLKLDLPNTWEKPQEQNVDMFDYISDQWLDIPVGEFTTSKKNVGEISFAMYEHECQLWKSGLFVKGVTIRPKY

SEQ ID NO: 108432 - protein, 320 aa, Arabidopsis thaliana
  peptide (1)..(320): Ceres Seq. ID no. 13667455
MDELVQIKEYMDQNRLVIIPIFYRIDLDVVKHLKGKFGNNFLDLVDKYHPEPKKLQKWMEALFSVCELFSLILPKNSDISDRDFVKSIVKAVKKVQRNFSQERNGVNEYQDFSVPPSKLTITMHESPNEEAVQVTVLNEFYQMKNQSPVPSYEFKFWVDLTRPKGNVFMIDARDLSIAWSEDSNHWTWLTLANQNSNESVMEIAFLKSASWLDVAGKFDTRYLTPRTRYEVVFVVKLEYTFEWETLVKLKLDLPNTWEKPQEQNVDMFDYISDQWLDIPVGEFTTSKKNVGEISFAMYEHECQLWKSGLFVKGVTIRPKY

SEQ ID NO: 108433 - DNA, 2525 bp, Arabidopsis thaliana
  misc_feature (1)..(2525): Ceres Seq. ID no. 13667460
  misc_feature (1)..(2525): Ortholog of  Ceres SEQ ID NO 13582534 as cited in SEQ ID NO 57409
ctcttttgaacacatgggaatacacttgggagagattggtattgttctctttccttgctttctgtggttaagtttattcctaagttgtggctatgcagctataactatttcaagtcctttgacattgggacaaactctgagttcccctggtggattttatgagttaggattcttcagtcctaacaactctcacaatcagtatgtagggatctggttcaagaaaattacaccacgggtggttgtgtgggtggctaacagagaaaagccgatcacaaaccctgtggcaaatcttactatcagcagaaatggtagtcttattttgctagacagtagtaaaaatgttgtttggtcaaccagaagaccttccatatctaataagtgtcatgcaaagctcttagatacaggaaatcttgtcatagtagatgatgtttcagaaaatcttttgtggcaaagttttgagaatcctggtgatactatgctgccttactcatcgctgatgtacaaccttgccactggggagaagcgagtattatcttcgtggaaaagccacactgatccatcccctggtgatttcgtagttcgactaacaccacaagtgccagcacagatcgttactatgagaggctcatcggtttataagagaagcggtccatgggctaagaccggtttcactggcgtaccactaatggatgaatcatacacaagtcctttcagcctttcccaagatgtaggaaatggaacagggctcttctcttatttacagagaagttctgaacttacacgagttatcataacatcagagggatatctaaagacttttcggtacaatgggacaggctgggttctggactttatcactccagcaaatttatgtgatttgtatggtgcatgtggaccttttgggctgtgtgtgacgtccaatcccacaaagtgtaaatgcatgaaagggtttgtaccaaaatacaaggaggagtggaagcgcgggaacatgacttctggatgtatgcgacgtacagaattatcttgtcaggcaaacttatctacaaagacacaaggaaaaggtgtagacgtcttctatcgtctggccaatgtaaagcctccggatctctacgaatatgcaagctttgtggatgcagatcaatgccaccagggttgtctcagcaattgctcttgctctgcttttgcgtatattactggaattggttgtttgctttggaatcatgagctaatagacacagttagatattccgttggaggagagtttctttccattcgtcttgcaagttcagaactggctggaaacaggaggaccaagattattgttggtagtatcagcctttccatttttgtgattttggcctttggctcatataagtactggagatacagagcaaaacaaaatgattcatggaaaaatggtttggaaccacaagaaatctcaggtttaacattctttgagatgaataccatacgaactgctaccaataacttcaatgtctcaaacaaactcggtcaaggtggatttggtccagtttataagggaacactgtcagacaagaaggatatagccgttaaacgcctttctagcagctctgggcagggtacagaagagttcatgaacgaaataaaactcatctcaaaattacaacacagaaacttggttcgacttttgggatgctgcattgatggagaagaaaaactactaatttatgagtttctagtgaacaaaagcctcgacacttttctctttgatttgacgctaaagcttcagattgattggcctaagaggttcaacatcattcaaggtgtttcacgtgggcttctctatctccatcgtgactcttgcatgagggtcatacatcgagatctgaaggtcagcaacattctcttggacgaaaaaatgaacccaaaaatatcagatttcggattggctcggatgtttcaaggaacccaacataagacaacactcgtaagggttgttggaactctaggatacatgtctcctgagtatgcatggacaggaatgttctcagagaagtccgacatatatgcttttggagttctcctgttagaaatcataagtgggaagaagatttcaagcttttgctgtggagaggaaggcaaaacccttcttggacatgcatgggaatgttggctcgagaccggtggagtggatctattggatgaagatattagcagctcgtgttctccagttgaagttgaagtcgctcgatgtgttcagattggtctactctgcatccaacagcaagctattgacagaccaaacatagcacaagtagtgaccatgatgacaagtgcaacagatcttccgagaccaaaacaaccactctttgcattgcagattcaagatcaagagagtgttgtgtcagtctcaaagtctgtgaaccatgttacacaaactgagatatatgggcgataaagtttgctttattatgtatgaactgcagactgaaatgtaataccagcaatagagtgtaatcacttaatttaaattgtacattacg

SEQ ID NO: 108434 - protein, 812 aa, Arabidopsis thaliana
  peptide (1)..(812): Ceres Seq. ID no. 13667461
SFEHMGIHLGEIGIVLFPCFLWLSLFLSCGYAAITISSPLTLGQTLSSPGGFYELGFFSPNNSHNQYVGIWFKKITPRVVVWVANREKPITNPVANLTISRNGSLILLDSSKNVVWSTRRPSISNKCHAKLLDTGNLVIVDDVSENLLWQSFENPGDTMLPYSSLMYNLATGEKRVLSSWKSHTDPSPGDFVVRLTPQVPAQIVTMRGSSVYKRSGPWAKTGFTGVPLMDESYTSPFSLSQDVGNGTGLFSYLQRSSELTRVIITSEGYLKTFRYNGTGWVLDFITPANLCDLYGACGPFGLCVTSNPTKCKCMKGFVPKYKEEWKRGNMTSGCMRRTELSCQANLSTKTQGKGVDVFYRLANVKPPDLYEYASFVDADQCHQGCLSNCSCSAFAYITGIGCLLWNHELIDTVRYSVGGEFLSIRLASSELAGNRRTKIIVGSISLSIFVILAFGSYKYWRYRAKQNDSWKNGLEPQEISGLTFFEMNTIRTATNNFNVSNKLGQGGFGPVYKGTLSDKKDIAVKRLSSSSGQGTEEFMNEIKLISKLQHRNLVRLLGCCIDGEEKLLIYEFLVNKSLDTFLFDLTLKLQIDWPKRFNIIQGVSRGLLYLHRDSCMRVIHRDLKVSNILLDEKMNPKISDFGLARMFQGTQHKTTLVRVVGTLGYMSPEYAWTGMFSEKSDIYAFGVLLLEIISGKKISSFCCGEEGKTLLGHAWECWLETGGVDLLDEDISSSCSPVEVEVARCVQIGLLCIQQQAIDRPNIAQVVTMMTSATDLPRPKQPLFALQIQDQESVVSVSKSVNHVTQTEIYGR

SEQ ID NO: 108435 - protein, 808 aa, Arabidopsis thaliana
  peptide (1)..(808): Ceres Seq. ID no. 13667462
MGIHLGEIGIVLFPCFLWLSLFLSCGYAAITISSPLTLGQTLSSPGGFYELGFFSPNNSHNQYVGIWFKKITPRVVVWVANREKPITNPVANLTISRNGSLILLDSSKNVVWSTRRPSISNKCHAKLLDTGNLVIVDDVSENLLWQSFENPGDTMLPYSSLMYNLATGEKRVLSSWKSHTDPSPGDFVVRLTPQVPAQIVTMRGSSVYKRSGPWAKTGFTGVPLMDESYTSPFSLSQDVGNGTGLFSYLQRSSELTRVIITSEGYLKTFRYNGTGWVLDFITPANLCDLYGACGPFGLCVTSNPTKCKCMKGFVPKYKEEWKRGNMTSGCMRRTELSCQANLSTKTQGKGVDVFYRLANVKPPDLYEYASFVDADQCHQGCLSNCSCSAFAYITGIGCLLWNHELIDTVRYSVGGEFLSIRLASSELAGNRRTKIIVGSISLSIFVILAFGSYKYWRYRAKQNDSWKNGLEPQEISGLTFFEMNTIRTATNNFNVSNKLGQGGFGPVYKGTLSDKKDIAVKRLSSSSGQGTEEFMNEIKLISKLQHRNLVRLLGCCIDGEEKLLIYEFLVNKSLDTFLFDLTLKLQIDWPKRFNIIQGVSRGLLYLHRDSCMRVIHRDLKVSNILLDEKMNPKISDFGLARMFQGTQHKTTLVRVVGTLGYMSPEYAWTGMFSEKSDIYAFGVLLLEIISGKKISSFCCGEEGKTLLGHAWECWLETGGVDLLDEDISSSCSPVEVEVARCVQIGLLCIQQQAIDRPNIAQVVTMMTSATDLPRPKQPLFALQIQDQESVVSVSKSVNHVTQTEIYGR

SEQ ID NO: 108436 - protein, 654 aa, Arabidopsis thaliana
  peptide (1)..(654): Ceres Seq. ID no. 13667463
MLPYSSLMYNLATGEKRVLSSWKSHTDPSPGDFVVRLTPQVPAQIVTMRGSSVYKRSGPWAKTGFTGVPLMDESYTSPFSLSQDVGNGTGLFSYLQRSSELTRVIITSEGYLKTFRYNGTGWVLDFITPANLCDLYGACGPFGLCVTSNPTKCKCMKGFVPKYKEEWKRGNMTSGCMRRTELSCQANLSTKTQGKGVDVFYRLANVKPPDLYEYASFVDADQCHQGCLSNCSCSAFAYITGIGCLLWNHELIDTVRYSVGGEFLSIRLASSELAGNRRTKIIVGSISLSIFVILAFGSYKYWRYRAKQNDSWKNGLEPQEISGLTFFEMNTIRTATNNFNVSNKLGQGGFGPVYKGTLSDKKDIAVKRLSSSSGQGTEEFMNEIKLISKLQHRNLVRLLGCCIDGEEKLLIYEFLVNKSLDTFLFDLTLKLQIDWPKRFNIIQGVSRGLLYLHRDSCMRVIHRDLKVSNILLDEKMNPKISDFGLARMFQGTQHKTTLVRVVGTLGYMSPEYAWTGMFSEKSDIYAFGVLLLEIISGKKISSFCCGEEGKTLLGHAWECWLETGGVDLLDEDISSSCSPVEVEVARCVQIGLLCIQQQAIDRPNIAQVVTMMTSATDLPRPKQPLFALQIQDQESVVSVSKSVNHVTQTEIYGR

SEQ ID NO: 108437 - DNA, 1290 bp, Arabidopsis thaliana
  misc_feature (1)..(1290): Ceres Seq. ID no. 13667491
  misc_feature (1)..(1290): Ortholog of  Ceres SEQ ID NO 13663419 as cited in SEQ ID NO 66561
actaaagtaaaatgagcttgacactagagtttctgcttcttctgattgtacttttcttgagtcaccatgctcattctggctctattgtcaaatttcttcctggttttgaaggccccctttctttcgaactcgaaaccgggtacattggtattggtgaggaagaggaagtgcaattattctactatttcatcaaatctgagaagaatccagaagaagaccctcttcttctatggttaagtggaggacctggatgttcctctctcactggccttctttttgagaatggaccggtggctttgaaattcgaggtttacaatggaagtgttccatctttggtctctactgcatattcatggacaaagatggcgaacataatattcttggatcagccagttggagctggcttctcctattcaagaactccacttgttgataaaactagtgacacgggtgaagttaagaggatttatgagtttcttcaaaagtggttaagcaaacatcaacaatttttttccaaccctttttacgttggtggagattcttattcaggtatgattgttccacctctagttcaagaaatcgcaaaaggaaattatcaaataaatctacagggttatatccttggaaacccgataacagatactgaatctgaacaaaactatcagattccatatgctcatggaatggcattaatctctgatgaactatacaagtcaatggagagaatctgcaaaggaaactatgtgaatgtagattcacttaacacaaaatgttataaactcatcaaagattatcaaaagtgtcttcataaactgaataagtatcatatattattacctgactgcgatataacatctcctgattgctttttatataggtatactctcatgaccttttgggccaacaacaagagcgttcgcgaagctctgcaagtcaataagggaagtataggagaatgggtacaatgtaactacaaaaatatttcctacaattacgacatcaagagcagtgtcgcgtaccatatgaagaatagtattgatggctaccgatctcttatctacaatggtgaccatgatatgatggtgcctttccttgcaactcaagcctggataagatctctcaattattccatcactgatgattggaggccttggatgataaacgatcaaattgctggatacacgagaagttattccaataagatgacatttgctactatcaaagcaagtcttcttgtgtcaacttaatatttgtattgtccttagactgcaataaaaaagactttgtttt

SEQ ID NO: 108438 - protein, 411 aa, Arabidopsis thaliana
  peptide (1)..(411): Ceres Seq. ID no. 13667492
MSLTLEFLLLLIVLFLSHHAHSGSIVKFLPGFEGPLSFELETGYIGIGEEEEVQLFYYFIKSEKNPEEDPLLLWLSGGPGCSSLTGLLFENGPVALKFEVYNGSVPSLVSTAYSWTKMANIIFLDQPVGAGFSYSRTPLVDKTSDTGEVKRIYEFLQKWLSKHQQFFSNPFYVGGDSYSGMIVPPLVQEIAKGNYQINLQGYILGNPITDTESEQNYQIPYAHGMALISDELYKSMERICKGNYVNVDSLNTKCYKLIKDYQKCLHKLNKYHILLPDCDITSPDCFLYRYTLMTFWANNKSVREALQVNKGSIGEWVQCNYKNISYNYDIKSSVAYHMKNSIDGYRSLIYNGDHDMMVPFLATQAWIRSLNYSITDDWRPWMINDQIAGYTRSYSNKMTFATIKASLLVST

SEQ ID NO: 108439 - protein, 294 aa, Arabidopsis thaliana
  peptide (1)..(294): Ceres Seq. ID no. 13667493
MANIIFLDQPVGAGFSYSRTPLVDKTSDTGEVKRIYEFLQKWLSKHQQFFSNPFYVGGDSYSGMIVPPLVQEIAKGNYQINLQGYILGNPITDTESEQNYQIPYAHGMALISDELYKSMERICKGNYVNVDSLNTKCYKLIKDYQKCLHKLNKYHILLPDCDITSPDCFLYRYTLMTFWANNKSVREALQVNKGSIGEWVQCNYKNISYNYDIKSSVAYHMKNSIDGYRSLIYNGDHDMMVPFLATQAWIRSLNYSITDDWRPWMINDQIAGYTRSYSNKMTFATIKASLLVST

SEQ ID NO: 108440 - protein, 231 aa, Arabidopsis thaliana
  peptide (1)..(231): Ceres Seq. ID no. 13667494
MIVPPLVQEIAKGNYQINLQGYILGNPITDTESEQNYQIPYAHGMALISDELYKSMERICKGNYVNVDSLNTKCYKLIKDYQKCLHKLNKYHILLPDCDITSPDCFLYRYTLMTFWANNKSVREALQVNKGSIGEWVQCNYKNISYNYDIKSSVAYHMKNSIDGYRSLIYNGDHDMMVPFLATQAWIRSLNYSITDDWRPWMINDQIAGYTRSYSNKMTFATIKASLLVST

SEQ ID NO: 108441 - DNA, 1051 bp, Arabidopsis thaliana
  misc_feature (1)..(1051): Ceres Seq. ID no. 13667503
  misc_feature (1)..(1051): Ortholog of  Ceres SEQ ID NO 13638532 as cited in SEQ ID NO 51186
  misc_feature (1)..(1051): Ortholog of  Ceres SEQ ID NO 14306733 as cited in SEQ ID NO 53866
  misc_feature (1)..(1051): Ortholog of  Ceres SEQ ID NO 13596350 as cited in SEQ ID NO 68204
attgggtacgggcccccctcgaggtcgacccacgcgtccgaagaaagaaaaccctaaaccaccggaaatcgatttctttggaagatggatatcgagcagaagcaagccgagatcattgatcagctcgtgaagcgagcttctacttgcaaatccgaggctctgggcccgctcatcatcgaagccacatcgcatccttctctcttcgccttctccgagattttggctctacccaatgttgcccagcttgaaggaaccacagattctgtgtacctggatctactacgcttgtttgcccatggcacctggggagactacaaatgcaatgccacccgtcttccgcacttgtcccctgaccaaattctcaagcttaagcagctcactgtcctcacccttgctgagtctaacaaggtattgccctatgatacactaatggtcgagttagatgtttccaatgttcgcgaactcgaggactttcttatcaatgaatgcatgtatgcgggtatagttaggggaaaactggatcagttaaaaagatgttttgaggttccgtttgcagctggtagggatctaaggccaggtcaactagggaatatgttacacacattgtccaactggttgaacacgtcagagaatctgctcatttcaattcaagacaagatcaaatgggcggacaatatgagtgagatggacaaaaaacatcgtaaggaagcagaagaaggggtggaagaagtgaagaagtctctgtccatgaagagggaataaggagatgtttggggaaccaagtggagtgatggactacgaagaagatgggatccgaccaaagaggaggaggcatcctgtaacaaggtagaggagcaagagagagcaaatggtcagtgcggattgacattccatttaccgagagtagattatgattatttggttgcggattttcaacttgtataagatcctctgttctctctcacaataaccccttgttatgtttgatttccctcattagcaaatttggtgtctttctgcccattaaaagaaaaatggctttgaatttagt

SEQ ID NO: 108442 - protein, 225 aa, Arabidopsis thaliana
  peptide (1)..(225): Ceres Seq. ID no. 13667504
MDIEQKQAEIIDQLVKRASTCKSEALGPLIIEATSHPSLFAFSEILALPNVAQLEGTTDSVYLDLLRLFAHGTWGDYKCNATRLPHLSPDQILKLKQLTVLTLAESNKVLPYDTLMVELDVSNVRELEDFLINECMYAGIVRGKLDQLKRCFEVPFAAGRDLRPGQLGNMLHTLSNWLNTSENLLISIQDKIKWADNMSEMDKKHRKEAEEGVEEVKKSLSMKRE

SEQ ID NO: 108443 - DNA, 726 bp, Arabidopsis thaliana
  misc_feature (1)..(726): Ceres Seq. ID no. 13667505
  misc_feature (1)..(726): Ortholog of  Ceres SEQ ID NO 15173263 as cited in SEQ ID NO 64606
cggcacgaggttttttttcccttctcccaatctcatcttctccgaaaacctttcttctctcaaatttctgtgaaaacatgtctgacgacgagcaccactttgaggccagcgaatccggagcttccaagacctatcctcaatcagccggtaacatccgtaaaggtggtcacatcgtcatcaaaaaccgtccctgcaaggttgttgaggtttcgacttccaaaactggcaagcacggtcacgccaaatgtcactttgttgctattgatatcttcactgctaagaagcttgaagatattgttccatcttcccacaattgtgatgttccacatgtgaaccgtgttgattaccagttgattgatatcactgaggatggcttcgtgagccttctcactgacagtggtggcaccaaggatgatctcaagcttcccaccgatgatggtctcaccgcccagatgaggcttggattcgatgagggaaaggatattgtggtgtctgtcatgtcttccatgggagaggagcagatctgtgccgtcaaggaagttggtggtggcaagtaaacaagtatcattcgatatattattaccagtttgacaacggacgtcaatgttataagaaccaaaagatgtttttctttttcctaatttagaccctttgtgtgtgtttcttgttgcaagacaaccatatctattggttttggattgttggaaaagtttgctcgtgccaatt

SEQ ID NO: 108444 - protein, 184 aa, Arabidopsis thaliana
  peptide (1)..(184): Ceres Seq. ID no. 13667506
ARGFFSLLPISSSPKTFLLSNFCENMSDDEHHFEASESGASKTYPQSAGNIRKGGHIVIKNRPCKVVEVSTSKTGKHGHAKCHFVAIDIFTAKKLEDIVPSSHNCDVPHVNRVDYQLIDITEDGFVSLLTDSGGTKDDLKLPTDDGLTAQMRLGFDEGKDIVVSVMSSMGEEQICAVKEVGGGK

SEQ ID NO: 108445 - protein, 159 aa, Arabidopsis thaliana; identical to SEQ ID NO: 41154
  peptide (1)..(159): Ceres Seq. ID no. 13667507

SEQ ID NO: 108446 - protein, 110 aa, Arabidopsis thaliana
  peptide (1)..(110): Ceres Seq. ID no. 13667508
RHEVFFPFSQSHLLRKPFFSQISVKTCLTTSTTLRPANPELPRPILNQPVTSVKVVTSSSKTVPARLLRFRLPKLASTVTPNVTLLLLISSLLRSLKILFHLPTIVMFHM

SEQ ID NO: 108447 - DNA, 860 bp, Arabidopsis thaliana
  misc_feature (1)..(860): Ceres Seq. ID no. 13667588
  misc_feature (1)..(860): Ortholog of  Ceres SEQ ID NO 14306110 as cited in SEQ ID NO 1363
caagaatatctctcttctacagtaaacaaaaaaatggcaatgaatggtttgtccaagatggctgtagccgccgcaactgctcttctcctagttctgaccattgtcccgggcgcagtagctgtgacttacactattgaatggaccactggtgtggactactcaggttgggctaccggaaagactttcagggttggtgacattctagagttcaagtatggttcttcccacacggtggatgtggttgacaaagccggatatgatggctgcgacggctcctcctcgactgagaaccattccgatggagacaccaaaatcgatcttaagactgtaggaataaactatttcatctgttctacaactggtcactgcagtggcggcatgaagctagccgttaatgtcgtagccggttctgccgacctccggccactcccacgccaccttcttcaactccgggaactcctaccacaccggaatcacctccgtctggcggatcacccacacccaccacacccacacctggtgcaggttcaacttctcctcctcctccaccaaaggcaagtggtgcgtctaagggagtgatgagttacgttttggtgggagtctcgatggttttgggttatggtttgtggatgtaattggtttagagagccagggtggagtcagtgcttttgcctttttaaattattttggtttttggttgtaagagaatttgggtttgtgtgccacgtcagaagctcttcattattcgtaggatttttattatctcggcatttgattatcgctatcatcatcatcatcacgttcacttattctcttgttgtattaaattatactattaattttcattttcgttcatgtgg

SEQ ID NO: 108448 - protein, 192 aa, Arabidopsis thaliana
  peptide (1)..(192): Ceres Seq. ID no. 13667589
QEYLSSTVNKKMAMNGLSKMAVAAATALLLVLTIVPGAVAVTYTIEWTTGVDYSGWATGKTFRVGDILEFKYGSSHTVDVVDKAGYDGCDGSSSTENHSDGDTKIDLKTVGINYFICSTTGHCSGGMKLAVNVVAGSADLRPLPRHLLQLRELLPHRNHLRLADHPHPPHPHLVQVQLLLLLHQRQVVRLRE

SEQ ID NO: 108449 - protein, 181 aa, Arabidopsis thaliana
  peptide (1)..(181): Ceres Seq. ID no. 13667590
MAMNGLSKMAVAAATALLLVLTIVPGAVAVTYTIEWTTGVDYSGWATGKTFRVGDILEFKYGSSHTVDVVDKAGYDGCDGSSSTENHSDGDTKIDLKTVGINYFICSTTGHCSGGMKLAVNVVAGSADLRPLPRHLLQLRELLPHRNHLRLADHPHPPHPHLVQVQLLLLLHQRQVVRLRE

SEQ ID NO: 108450 - protein, 179 aa, Arabidopsis thaliana
  peptide (1)..(179): Ceres Seq. ID no. 13667591
MNGLSKMAVAAATALLLVLTIVPGAVAVTYTIEWTTGVDYSGWATGKTFRVGDILEFKYGSSHTVDVVDKAGYDGCDGSSSTENHSDGDTKIDLKTVGINYFICSTTGHCSGGMKLAVNVVAGSADLRPLPRHLLQLRELLPHRNHLRLADHPHPPHPHLVQVQLLLLLHQRQVVRLRE

SEQ ID NO: 108451 - DNA, 993 bp, Arabidopsis thaliana
  misc_feature (1)..(993): Ceres Seq. ID no. 13667592
  misc_feature (1)..(993): Ortholog of  Ceres SEQ ID NO 12474640 as cited in SEQ ID NO 129
  misc_feature (1)..(993): Ortholog of  Ceres SEQ ID NO 12627370 as cited in SEQ ID NO 61162
  misc_feature (1)..(993): Ortholog of  Ceres SEQ ID NO 13598268 as cited in SEQ ID NO 69313
ccacgcgtccgtctttcttcttcctgattggaattttagggcttttgaaagcacgaacgcgtgaagctctaatcgagaaaaaaatggaggttttggataggagagacgatgagatcagggactcgggaaacatggacagcatcaagtcacactatgttaccgactctgtttccgaggaacgccgctctcgtgagctcaaggatggtctccatcctttacggtacaagttttcgatatggtacactcgtcgcacaccaggggttcggaaccagtcttatgaagataacatcaagaagatggtagaattcagcacggttgaaggattttgggcctgctactgtcaccttgctcgttcttctctcttgcctagtccaacagatcttcatttctttaaggatgggattcgtccattgtgggaggatggtgccaactgcaatggaggaaagtggatcatacgtttctcaaaagttgtatctgctcgcttctgggaggatctgcttcttgcgttggtaggcgaccagcttgatgatgctgataacatatgtggggcagtactgagtgtccgtttcaacgaggacatcattagtgtatggaatcgcaatgcttctgaccatcaggcagtgatgggtttgagagactcaatcaagcggcatttgaagttgcctcatgcatatgtcatggaatacaagccacacgatgcttctctccgcgacaactcttcctacagaaacacatggctgagaggataggcccaaagtcgatgattgtatcatgtaatgtggagaagatttgggaagctcatctgcaacctgggaagatatctggattgaaccctgtatccaataccatactgtaccggaggcttacaatatcagaaaaacaaaatccgggctacttctgtgtcagtatgtgttcatttcgtttttcttttacagtacatcttgttaacttcaatggtttgactcttgatcaaaactataagggttaattttc

SEQ ID NO: 108452 - protein, 248 aa, Arabidopsis thaliana
  peptide (1)..(248): Ceres Seq. ID no. 13667593
TRPSFFFLIGILGLLKARTREALIEKKMEVLDRRDDEIRDSGNMDSIKSHYVTDSVSEERRSRELKDGLHPLRYKFSIWYTRRTPGVRNQSYEDNIKKMVEFSTVEGFWACYCHLARSSLLPSPTDLHFFKDGIRPLWEDGANCNGGKWIIRFSKVVSARFWEDLLLALVGDQLDDADNICGAVLSVRFNEDIISVWNRNASDHQAVMGLRDSIKRHLKLPHAYVMEYKPHDASLRDNSSYRNTWLRG

SEQ ID NO: 108453 - protein, 221 aa, Arabidopsis thaliana
  peptide (1)..(221): Ceres Seq. ID no. 13667594
MEVLDRRDDEIRDSGNMDSIKSHYVTDSVSEERRSRELKDGLHPLRYKFSIWYTRRTPGVRNQSYEDNIKKMVEFSTVEGFWACYCHLARSSLLPSPTDLHFFKDGIRPLWEDGANCNGGKWIIRFSKVVSARFWEDLLLALVGDQLDDADNICGAVLSVRFNEDIISVWNRNASDHQAVMGLRDSIKRHLKLPHAYVMEYKPHDASLRDNSSYRNTWLRG

SEQ ID NO: 108454 - protein, 205 aa, Arabidopsis thaliana
  peptide (1)..(205): Ceres Seq. ID no. 13667595
MDSIKSHYVTDSVSEERRSRELKDGLHPLRYKFSIWYTRRTPGVRNQSYEDNIKKMVEFSTVEGFWACYCHLARSSLLPSPTDLHFFKDGIRPLWEDGANCNGGKWIIRFSKVVSARFWEDLLLALVGDQLDDADNICGAVLSVRFNEDIISVWNRNASDHQAVMGLRDSIKRHLKLPHAYVMEYKPHDASLRDNSSYRNTWLRG

SEQ ID NO: 108455 - DNA, 1567 bp, Arabidopsis thaliana
  misc_feature (1)..(1567): Ceres Seq. ID no. 13667645
  misc_feature (1)..(1567): Ortholog of  Ceres SEQ ID NO 13597656 as cited in SEQ ID NO 65561
ccacgcgtccgtaagaagattttgccagtgcgggaagcggcggagattgagagattagcgacgatggaggaaagcaaacagaactatgacctgacgccactaatagcgcctaacctggacagacacttggtgtttcctatattcgagttccttcaagagcgtcagctttaccctgatgagcagatcctgaagtctaaaatccagcttttgaaccagacgaacatggttgattacgccatggatattcacaagagtctctaccacactgaagacgctcctcaagaaatggtggagagaagaacagaggttgtcgctaggctcaaatctttggaggaggctgctgcaccactcgtgtcttttcttttgaaccctaacgctgtgcaggagctaagagctgacaagcagtacaatctccaaatgctcaaggaacgctaccagattggtccagaccagattgaggctttgtaccagtacgccaagtttcagtttgaatgtggcaactattctggtgctgctgattatctttaccagtacaggaccctgtgctctaaccttgagaggagtttgagtgccttgtggggaaagctcgcatctgaaatattgatgcaaaactgggatattgctcttgaagagcttaaccgtctcaaagagattattgactcaaagagtttttcatcgccgttaaaccaggtgcagaacaggatttggttgatgcattggggtctgtatatcttttttaaccatgataatggaaggacacagatcattgatctttttaaccaagacaagtatctgaatgccatccaaactagtgctccacacttgctgcgctacttggcaactgctttcattgtcaacaaaaggagaagaccacaattgaaagacttcattaaggtcattcagcaagagcactactcctacaaagatccaattatcgagttcctggcatgtgtgtttgtcaattatgactttgatggggctcaaaagaagatgaaagagtgtgaagaggtcattgtgaatgatccattccttggcaagcgagttgaggatggaaacttttcaactgtaccactgagagatgaattttttgaaaatgcccgcctattcgtctttgaaaccttttgcaaaattcatcaaaggattgacatgggggtacttcgtgaaaaattgaatctgaactatgaggaggccgagagatggattgtgaacctaatccgcacctcaaagcttgatgccaagattgattctgagtcaggaactgtaatcatggtgcctactcagcccaacgtgcatgagcagttgataaaccacaccaaaggcttatcaggacgaacatacaagttagtgaatcagctcttggaacacacacaggcgcaagcaactcgctagtcaaaattttgctgtggaagcctttccttgataaaactcaccttcggttgactggaattattttctttttcttgctctgagttcaccttttactttgaaaaagattattatggagttgttctatttgaaatgttggatccacagattggaacattttccaaccaaatcagcattttgt

SEQ ID NO: 108456 - protein, 462 aa, Arabidopsis thaliana
  peptide (1)..(462): Ceres Seq. ID no. 13667646
PRVRKKILPVREAAEIERLATMEESKQNYDLTPLIAPNLDRHLVFPIFEFLQERQLYPDEQILKSKIQLLNQTNMVDYAMDIHKSLYHTEDAPQEMVERRTEVVARLKSLEEAAAPLVSFLLNPNAVQELRADKQYNLQMLKERYQIGPDQIEALYQYAKFQFECGNYSGAADYLYQYRTLCSNLERSLSALWGKLASEILMQNWDIALEELNRLKEIIDSKSFSSPLNQVQNRIWLMHWGLYIFFNHDNGRTQIIDLFNQDKYLNAIQTSAPHLLRYLATAFIVNKRRRPQLKDFIKVIQQEHYSYKDPIIEFLACVFVNYDFDGAQKKMKECEEVIVNDPFLGKRVEDGNFSTVPLRDEFFENARLFVFETFCKIHQRIDMGVLREKLNLNYEEAERWIVNLIRTSKLDAKIDSESGTVIMVPTQPNVHEQLINHTKGLSGRTYKLVNQLLEHTQAQATR

SEQ ID NO: 108457 - protein, 441 aa, Arabidopsis thaliana
  peptide (1)..(441): Ceres Seq. ID no. 13667647
MEESKQNYDLTPLIAPNLDRHLVFPIFEFLQERQLYPDEQILKSKIQLLNQTNMVDYAMDIHKSLYHTEDAPQEMVERRTEVVARLKSLEEAAAPLVSFLLNPNAVQELRADKQYNLQMLKERYQIGPDQIEALYQYAKFQFECGNYSGAADYLYQYRTLCSNLERSLSALWGKLASEILMQNWDIALEELNRLKEIIDSKSFSSPLNQVQNRIWLMHWGLYIFFNHDNGRTQIIDLFNQDKYLNAIQTSAPHLLRYLATAFIVNKRRRPQLKDFIKVIQQEHYSYKDPIIEFLACVFVNYDFDGAQKKMKECEEVIVNDPFLGKRVEDGNFSTVPLRDEFFENARLFVFETFCKIHQRIDMGVLREKLNLNYEEAERWIVNLIRTSKLDAKIDSESGTVIMVPTQPNVHEQLINHTKGLSGRTYKLVNQLLEHTQAQATR

SEQ ID NO: 108458 - protein, 388 aa, Arabidopsis thaliana
  peptide (1)..(388): Ceres Seq. ID no. 13667648
MVDYAMDIHKSLYHTEDAPQEMVERRTEVVARLKSLEEAAAPLVSFLLNPNAVQELRADKQYNLQMLKERYQIGPDQIEALYQYAKFQFECGNYSGAADYLYQYRTLCSNLERSLSALWGKLASEILMQNWDIALEELNRLKEIIDSKSFSSPLNQVQNRIWLMHWGLYIFFNHDNGRTQIIDLFNQDKYLNAIQTSAPHLLRYLATAFIVNKRRRPQLKDFIKVIQQEHYSYKDPIIEFLACVFVNYDFDGAQKKMKECEEVIVNDPFLGKRVEDGNFSTVPLRDEFFENARLFVFETFCKIHQRIDMGVLREKLNLNYEEAERWIVNLIRTSKLDAKIDSESGTVIMVPTQPNVHEQLINHTKGLSGRTYKLVNQLLEHTQAQATR

SEQ ID NO: 108459 - DNA, 1335 bp, Arabidopsis thaliana
  misc_feature (1)..(1335): Ceres Seq. ID no. 13667657
  misc_feature (1)..(1335): Ortholog of  Ceres SEQ ID NO 15177854 as cited in SEQ ID NO 51851
  misc_feature (1)..(1335): Ortholog of  Ceres SEQ ID NO 15177087 as cited in SEQ ID NO 51932
  misc_feature (1)..(1335): Ortholog of  Ceres SEQ ID NO 13662937 as cited in SEQ ID NO 64415
  misc_feature (1)..(1335): Ortholog of  Ceres SEQ ID NO 13595984 as cited in SEQ ID NO 68340
  misc_feature (1)..(1335): Ortholog of  Ceres SEQ ID NO 12635014 as cited in SEQ ID NO 0
gaactagtctcgaattttctatttccgaataacaaaaccgatcggcggagacatgacggcggcacaagggaactctaacgagactctgttttcttcttacaagatgggaagattcgatctctctcatcgagtggttctggcgccgatgacgcggtgcagggcgttgaacggagtaccaaacgcggcgttggcagagtattatgctcaacggaccactcccggcggttttctcatctccgaaggcaccatggtctctcccggatccgcagggttcccacatgtgcctggaatctattcagatgaacaagtagaagcatggaagcaagtggtggaagcagttcacgctaagggaggtttcatcttttgtcaattatggcatgttggacgtgcttctcatgcagtgtatcaacctaatggaggatcaccaatatcgtcaacgaacaaaccaatctcggaaaacaggtggcgagttttgttgcccgatggttcccacgtgaagtacccgaaacctcgggctttagaagcttccgagatacctcgggtggtggaggattattgcctttctgctttgaatgcgattcgagctggtttcgatgggattgagatccacggggcgcatggttacctcattgatcagtttttgaaagacgggatcaatgaccgtactgaccaatacggaggatccattgaaaaccgttgtagattcttgaaacaagtagtggaaggtgtagtttcagccataggagctagtaaagttggtgtgagggtatctccagctatagatcacttggacgcaactgattctaacccattatcactcgggctagccgtggttgatatgctcaataagttacaagatgttaatggcttgaagctcgcttaccttcacgttacacaacctcgctaccacgcctatgggcaaacagagtcgggaaggcaagggagtgatgaggaagaagctaagctaatgaagagcttgagaatggcttataaaggaacctttatgtctagtggaggattcaataaggaactaggcatgcaagctgttcaacaaggtgatgctgatttggtttcatatggcaggctttttatcgcaaacccggatttggtttcgcggttcaagattgatggagagttgaataaatataatcggaagacgttttacactcaagatccagttgttggctacacggattatcctttcttggctccttcttcccgcctctgagtttgataatcggaggagaaaatgtattgatgttgtataaagacaatatattaataagtaaaatgacaatgttattgttatccacttaatgaatagtcatgtatctt

SEQ ID NO: 108460 - protein, 391 aa, Arabidopsis thaliana
  peptide (1)..(391): Ceres Seq. ID no. 13667658
MTAAQGNSNETLFSSYKMGRFDLSHRVVLAPMTRCRALNGVPNAALAEYYAQRTTPGGFLISEGTMVSPGSAGFPHVPGIYSDEQVEAWKQVVEAVHAKGGFIFCQLWHVGRASHAVYQPNGGSPISSTNKPISENRWRVLLPDGSHVKYPKPRALEASEIPRVVEDYCLSALNAIRAGFDGIEIHGAHGYLIDQFLKDGINDRTDQYGGSIENRCRFLKQVVEGVVSAIGASKVGVRVSPAIDHLDATDSNPLSLGLAVVDMLNKLQDVNGLKLAYLHVTQPRYHAYGQTESGRQGSDEEEAKLMKSLRMAYKGTFMSSGGFNKELGMQAVQQGDADLVSYGRLFIANPDLVSRFKIDGELNKYNRKTFYTQDPVVGYTDYPFLAPSSRL

SEQ ID NO: 108461 - protein, 374 aa, Arabidopsis thaliana
  peptide (1)..(374): Ceres Seq. ID no. 13667659
MGRFDLSHRVVLAPMTRCRALNGVPNAALAEYYAQRTTPGGFLISEGTMVSPGSAGFPHVPGIYSDEQVEAWKQVVEAVHAKGGFIFCQLWHVGRASHAVYQPNGGSPISSTNKPISENRWRVLLPDGSHVKYPKPRALEASEIPRVVEDYCLSALNAIRAGFDGIEIHGAHGYLIDQFLKDGINDRTDQYGGSIENRCRFLKQVVEGVVSAIGASKVGVRVSPAIDHLDATDSNPLSLGLAVVDMLNKLQDVNGLKLAYLHVTQPRYHAYGQTESGRQGSDEEEAKLMKSLRMAYKGTFMSSGGFNKELGMQAVQQGDADLVSYGRLFIANPDLVSRFKIDGELNKYNRKTFYTQDPVVGYTDYPFLAPSSRL

SEQ ID NO: 108462 - protein, 360 aa, Arabidopsis thaliana
  peptide (1)..(360): Ceres Seq. ID no. 13667660
MTRCRALNGVPNAALAEYYAQRTTPGGFLISEGTMVSPGSAGFPHVPGIYSDEQVEAWKQVVEAVHAKGGFIFCQLWHVGRASHAVYQPNGGSPISSTNKPISENRWRVLLPDGSHVKYPKPRALEASEIPRVVEDYCLSALNAIRAGFDGIEIHGAHGYLIDQFLKDGINDRTDQYGGSIENRCRFLKQVVEGVVSAIGASKVGVRVSPAIDHLDATDSNPLSLGLAVVDMLNKLQDVNGLKLAYLHVTQPRYHAYGQTESGRQGSDEEEAKLMKSLRMAYKGTFMSSGGFNKELGMQAVQQGDADLVSYGRLFIANPDLVSRFKIDGELNKYNRKTFYTQDPVVGYTDYPFLAPSSRL

SEQ ID NO: 108463 - DNA, 1146 bp, Arabidopsis thaliana
  misc_feature (1)..(1146): Ceres Seq. ID no. 13667665
  misc_feature (1)..(1146): Ortholog of  Ceres SEQ ID NO 13594193 as cited in SEQ ID NO 58558
  misc_feature (1)..(1146): Ortholog of  Ceres SEQ ID NO 15177545 as cited in SEQ ID NO 0
acacaaagtcataacagtcgtttaaagtctgatccttttcatttttctttagtgtgtgaaaagagaaatacagttatggcggagatctcgggaaacggtggtgatgctagagacggagctgtggtggtcaatctcaaggaagaagacgaacaacaacaacaacaacaagctattcataaacccttgaagaaacaagactctctcctctctatctctgtccctttcttacaaaagttgatggcggaggttttgggaacatacttcttgatattcgccggttgtgccgcggtggctgtaaacacacaacatgacaaagccgtgactcttccagggatcgccatcgtttggggacttaccgtcatggtccttgtttactctctcggtcacatctccggtgctcatttcaatccggccgtcacaatcgcattcgcttcttgcggccgtttccctcttaaacaggttccggcttatgtgatatcacaagtgatcggatcaacgctagcggcggcgactttacggctcttgttcggacttgatcaagatgtttgtagtgggaaacacgatgtgttcgtcggaacattaccatctggatcgaatttgcagtcgtttgtgatcgagtttatcattactttctacctaatgttcgttatttctggcgttgccaccgataatagagcgatcggagaacttgctggactagcagtaggatcaacagtgctacttaacgtgataattgccgggccggtatcgggagcatcgatgaatccaggacgaagtttaggacctgcaatggtctacagttgctacagaggactttggatctacatagtttctccaattgttggtgcagtttcgggtgcgtgggtttataacatggttcgatatactgataagccattacgagaaataactaaaagcggttcttttttaaagacagtgcgaaacggtagctctcgttaagaaaaagaaaaacatgactatgttgtactagtcatcggaggttaagttgtatcactaaagaagtaactggaatattttgtattaaagtgtttttaaatttggattaccgcaaatggataaacatttatggtatgtgacgaatatgtaactgatctataacgagtttggccatatctaattacgtgc

SEQ ID NO: 108464 - protein, 319 aa, Arabidopsis thaliana
  peptide (1)..(319): Ceres Seq. ID no. 13667666
TQSHNSRLKSDPFHFSLVCEKRNTVMAEISGNGGDARDGAVVVNLKEEDEQQQQQQAIHKPLKKQDSLLSISVPFLQKLMAEVLGTYFLIFAGCAAVAVNTQHDKAVTLPGIAIVWGLTVMVLVYSLGHISGAHFNPAVTIAFASCGRFPLKQVPAYVISQVIGSTLAAATLRLLFGLDQDVCSGKHDVFVGTLPSGSNLQSFVIEFIITFYLMFVISGVATDNRAIGELAGLAVGSTVLLNVIIAGPVSGASMNPGRSLGPAMVYSCYRGLWIYIVSPIVGAVSGAWVYNMVRYTDKPLREITKSGSFLKTVRNGSSR

SEQ ID NO: 108465 - protein, 294 aa, Arabidopsis thaliana; identical to SEQ ID NO: 40718
  peptide (1)..(294): Ceres Seq. ID no. 13667667

SEQ ID NO: 108466 - protein, 240 aa, Arabidopsis thaliana; identical to SEQ ID NO: 40719
  peptide (1)..(240): Ceres Seq. ID no. 13667668

SEQ ID NO: 108467 - DNA, 1806 bp, Arabidopsis thaliana
  misc_feature (1)..(1806): Ceres Seq. ID no. 13667673
  misc_feature (1)..(1806): Ortholog of  Ceres SEQ ID NO 13596021 as cited in SEQ ID NO 62020
cagagagcagctcccttcccctcggcgaggaggaaggaagaagaaagccagagagagagagagagatcatcgcagcttctcctccgaccatttgactgcgactgtgattacaacacaccgttgatcctacgaaaaagaggtaatggatactggcggcaattcgctggcgtccggacctgatggtgtgaagaggaaagtttgttatttctatgaccctgaggtcggcaattactactatggccaaggtcatcccatgaagccccatcgcatccgcatgacccatgccctcctcgctcactacggtctccttcagcatatgcaggttctcaagcccttccctgcccgcgaacgtgatctctgccgcttccacgccgacgactatgtctcttttctccgcagcattacccctgaaacccagcaagatcagattcgccaacttaagcgcttcaatgttggtgaagactgtcccgtctttgacggcctttattccttttgccagacctatgctggaggatctgttggtggctctgtcaagcttaaccacggcctctgcgatattgccatcaactgggctggtggtctccatcacgctaagaagtgcgaggcctctggcttctgttacgtcaatgatatcgtcttagctatcctagagctccttaagcagcatgagcgtgttctttatgtcgatattgatatccaccacggggatggagtggaggaggcattttatgctactgacagggttatgactgtctcgtttcataaatttggtgattactttcccggtacaggtcacattcaggatataggttatggtagcggaaagtactattctctcaatgtaccactggatgatggaatcgatgatgagagctatcatctgttattcaagcccatcatggggaaagttatggaaattttccgaccaggggctgtggtattgcaatgtggtgctgactccctatctggggatcggttaggttgcttcaatctttcaatcaaaggtcatgctgagtgcgtcaaatttatgagatcgttcaatgttcccctactgctcttgggtggtggtggttacactatccgcaatgttgcccgttgctggtgctacgagactggagttgcacttggagttgaagttgaagacaagatgccggagcatgaatattatgaatactttggtccagactatacacttcacgttgctccaagtaacatggaaaataagaattctcgtcagatgcttgaagagattcgcaatgaccttctccacaatctctctaagcttcagcatgctccaagtgtaccatttcaggaaagaccacctgatacagagactcccgaggttgatgaagaccaagaagatggggataaaagatgggatccggattcagacatggatgttgatgatgaccgtaaacctataccaagcagagtaaaaagagaagctgttgaaccagatacaaaggacaaggatggactgaaaggaattatggagcgtggaaaaggttgtgaggtggaggtggatgagagtggaagcactaaggttacaggagtaaacccagtgggagtggaggaagcaagtgtgaaaatggaagaggaaggaacaaacaagggtggggcggagcaggcgtttcctcctaaaacataagactcggagcttctaatttcttgctactttttctgtctatcaaatgttgctagttaagtttctggagttgttgttgttgtaagcactcctctgttttagaggattgagcacggatatgtatttattcgttgcatgtctgaatgatgatatgatatgac

SEQ ID NO: 108468 - protein, 501 aa, Arabidopsis thaliana
  peptide (1)..(501): Ceres Seq. ID no. 13667674
MDTGGNSLASGPDGVKRKVCYFYDPEVGNYYYGQGHPMKPHRIRMTHALLAHYGLLQHMQVLKPFPARERDLCRFHADDYVSFLRSITPETQQDQIRQLKRFNVGEDCPVFDGLYSFCQTYAGGSVGGSVKLNHGLCDIAINWAGGLHHAKKCEASGFCYVNDIVLAILELLKQHERVLYVDIDIHHGDGVEEAFYATDRVMTVSFHKFGDYFPGTGHIQDIGYGSGKYYSLNVPLDDGIDDESYHLLFKPIMGKVMEIFRPGAVVLQCGADSLSGDRLGCFNLSIKGHAECVKFMRSFNVPLLLLGGGGYTIRNVARCWCYETGVALGVEVEDKMPEHEYYEYFGPDYTLHVAPSNMENKNSRQMLEEIRNDLLHNLSKLQHAPSVPFQERPPDTETPEVDEDQEDGDKRWDPDSDMDVDDDRKPIPSRVKREAVEPDTKDKDGLKGIMERGKGCEVEVDESGSTKVTGVNPVGVEEASVKMEEEGTNKGGAEQAFPPKT

SEQ ID NO: 108469 - protein, 464 aa, Arabidopsis thaliana
  peptide (1)..(464): Ceres Seq. ID no. 13667675
MKPHRIRMTHALLAHYGLLQHMQVLKPFPARERDLCRFHADDYVSFLRSITPETQQDQIRQLKRFNVGEDCPVFDGLYSFCQTYAGGSVGGSVKLNHGLCDIAINWAGGLHHAKKCEASGFCYVNDIVLAILELLKQHERVLYVDIDIHHGDGVEEAFYATDRVMTVSFHKFGDYFPGTGHIQDIGYGSGKYYSLNVPLDDGIDDESYHLLFKPIMGKVMEIFRPGAVVLQCGADSLSGDRLGCFNLSIKGHAECVKFMRSFNVPLLLLGGGGYTIRNVARCWCYETGVALGVEVEDKMPEHEYYEYFGPDYTLHVAPSNMENKNSRQMLEEIRNDLLHNLSKLQHAPSVPFQERPPDTETPEVDEDQEDGDKRWDPDSDMDVDDDRKPIPSRVKREAVEPDTKDKDGLKGIMERGKGCEVEVDESGSTKVTGVNPVGVEEASVKMEEEGTNKGGAEQAFPPKT

SEQ ID NO: 108470 - protein, 457 aa, Arabidopsis thaliana
  peptide (1)..(457): Ceres Seq. ID no. 13667676
MTHALLAHYGLLQHMQVLKPFPARERDLCRFHADDYVSFLRSITPETQQDQIRQLKRFNVGEDCPVFDGLYSFCQTYAGGSVGGSVKLNHGLCDIAINWAGGLHHAKKCEASGFCYVNDIVLAILELLKQHERVLYVDIDIHHGDGVEEAFYATDRVMTVSFHKFGDYFPGTGHIQDIGYGSGKYYSLNVPLDDGIDDESYHLLFKPIMGKVMEIFRPGAVVLQCGADSLSGDRLGCFNLSIKGHAECVKFMRSFNVPLLLLGGGGYTIRNVARCWCYETGVALGVEVEDKMPEHEYYEYFGPDYTLHVAPSNMENKNSRQMLEEIRNDLLHNLSKLQHAPSVPFQERPPDTETPEVDEDQEDGDKRWDPDSDMDVDDDRKPIPSRVKREAVEPDTKDKDGLKGIMERGKGCEVEVDESGSTKVTGVNPVGVEEASVKMEEEGTNKGGAEQAFPPKT

SEQ ID NO: 108471 - DNA, 1391 bp, Arabidopsis thaliana
  misc_feature (1)..(1391): Ceres Seq. ID no. 13667677
  misc_feature (1)..(1391): Ortholog of  Ceres SEQ ID NO 13596921 as cited in SEQ ID NO 62368
  misc_feature (1)..(1391): Ortholog of  Ceres SEQ ID NO 13600673 as cited in SEQ ID NO 0
gaattccggaataatcatggagtttcatcaagctcacttccacctttcctcaccaaaacatatgagatggttgatgattcttcatccgattctatcgtctcttggagtcagagcaataagagtttcatcgtttggaatccgccggagttttctagagatcttcttccgagattcttcaagcacaataacttctctagctttatccgccagcttaacacatatggttttagaaaagctgatcctgagcaatgggaatttgcgaatgatgattttgtgagaggtcaacctcatcttatgaagaacattcatagacgcaaaccagttcatagccactctttaccgaatcttcaagctcagttaaacccgttgacggattcagaacgagtgagaatgaataatcagattgagagattgacaaaagagaaagaaggattgcttgaagagttacataaacaagacgaggaacgagaagtgtttgagatgcaagtgaaagaacttaaagaacgattacaacacatggagaagcgtcagaaaacaatggtttcgtttgtttctcaagtattggaaaagccagggcttgctttgaacctatcgccgtgtgttcccgaaacaaacgagaggaaaagaaggttccctaggatcgagttctttcccgatgaaccgatgttggaagagaacaaaacttgtgttgttgtgagagaggaaggttctacaagcccttcttcacacacaagagagcatcaagtggaacagttagagtcatcgatagcgatttgggagaatcttgtatcggattcttgtgagagtatgttacaatcaagaagtatgatgacacttgatgtggatgaatcatctacttttccagagagccctcctctttcttgcatacagttaagtgtcgattcacgtctcaaatctcctccttctccaaggatcatcgatatgaactgtgagcccgatggttcgaaagaacagaacactgttgctgctcctcctcctcctccagtagcaggagcgaatgatggcttctggcagcagtttttctcagagaatcctggctcaaccgagcaacgggaagttcaattagagaggaaagacgataaagataaagccggagtacgtactgagaaatgctggtggaattcgagaaatgttaatgcaattacagaacagcttggacatctgacttcttcagagagaagttgatatgtcaaagattaaatttctagtctgttttagttacttgtaaaatagggtttctcagttttattgttttcgattacagtacttaggtatggttcagctgtttatttatcacttgtatgatctttcacagttcattgtagcagacttcaatggtaatgataagctagagcttatggatagtattc

SEQ ID NO: 108472 - protein, 401 aa, Arabidopsis thaliana
  peptide (1)..(401): Ceres Seq. ID no. 13667678
EFRNNHGVSSSSLPPFLTKTYEMVDDSSSDSIVSWSQSNKSFIVWNPPEFSRDLLPRFFKHNNFSSFIRQLNTYGFRKADPEQWEFANDDFVRGQPHLMKNIHRRKPVHSHSLPNLQAQLNPLTDSERVRMNNQIERLTKEKEGLLEELHKQDEEREVFEMQVKELKERLQHMEKRQKTMVSFVSQVLEKPGLALNLSPCVPETNERKRRFPRIEFFPDEPMLEENKTCVVVREEGSTSPSSHTREHQVEQLESSIAIWENLVSDSCESMLQSRSMMTLDVDESSTFPESPPLSCIQLSVDSRLKSPPSPRIIDMNCEPDGSKEQNTVAAPPPPPVAGANDGFWQQFFSENPGSTEQREVQLERKDDKDKAGVRTEKCWWNSRNVNAITEQLGHLTSSERS

SEQ ID NO: 108473 - protein, 379 aa, Arabidopsis thaliana; identical to SEQ ID NO: 83118
  peptide (1)..(379): Ceres Seq. ID no. 13667679

SEQ ID NO: 108474 - protein, 303 aa, Arabidopsis thaliana; identical to SEQ ID NO: 83119
  peptide (1)..(303): Ceres Seq. ID no. 13667680

SEQ ID NO: 108475 - DNA, 1296 bp, Arabidopsis thaliana
  misc_feature (1)..(1296): Ceres Seq. ID no. 13667681
  misc_feature (1)..(1296): Ortholog of  Ceres SEQ ID NO 13581848 as cited in SEQ ID NO 51340
  misc_feature (1)..(1296): Ortholog of  Ceres SEQ ID NO 13595392 as cited in SEQ ID NO 56164
  misc_feature (1)..(1296): Ortholog of  Ceres SEQ ID NO 14316412 as cited in SEQ ID NO 59209
  misc_feature (1)..(1296): Ortholog of  Ceres SEQ ID NO 12618341 as cited in SEQ ID NO 64256
accagtaatctcaatcacaaactatttcccccccttcgttcatcaaatcctcaagagaaaaaaaaaatccccaaaagcttcctcaaaaccctaacacagatctctcgatcttctccgatctgtcttttctcctaatctggtttagtttgattttattggattgaagatgtcagacgctttgaatatgactcttgatgaaattgtgaagaagagtaagagtgaaaggtctgcagctgcaaggtctggaggtaaaggagtttcccgtaagagtggacgtggacgtggtggacctaatggtgttgtaggaggtggaagaggaggtggacctgttcgtagaggtcctcttgctgttaatactcggccatcatcatccttctccataaacaagcttgcccgcaggaagaggagcttgccatggcagaatcagaatgatttgtatgaagaaacccttagagctgttggggtatcaggagtggaagtcggaaccacagtttatattaccaaccttgatcagggagtgacaaatgaagatataagggaactctatgctgaaattggagagctgaaaagatatgcaattcactatgacaaaaatgggcgtccaagtggatcggctgaagttgtgtatatgagaagaagtgatgcaattcaagctatgaggaaatacaataatgtacttttggatggaaggcctatgaaactggagattctgggtggaaatactgaatctgctcctgtcgcagctcgtgttaatgtgactggattgaatggaaggatgaagaggagtgtcttcattggacaaggagttagaggtgggagagtaggaagaggaagaggttcaggtccttctgggagacgccttccactccaacaaaaccaacaaggtggtgtgacagctggtcgaggcgggttccgtggtagaggccggggtaatggtggtggcagagggaataaaagcggtgggcgaggtggaaagaagccagtggagaagtctgctgcggatctcgacaaagatctcgaaagctatcatgctgaagctatgaacatctcttaaacagaagcaagacttcgcatcttgtcatgtacttttgtgttctttattcttagtctctgactaaatatgtggcaaagtctggtttggtttaattacgtttaggatggctctactctgcttttattttcctcttttcttgtttcacactttcacagtcacttttggttattgaagttaaaagagatttagctgtaaatgagaaagctgttattgttagttggttgaatctaataatatacgaa

SEQ ID NO: 108476 - protein, 295 aa, Arabidopsis thaliana; identical to SEQ ID NO: 40675
  peptide (1)..(295): Ceres Seq. ID no. 13667682

SEQ ID NO: 108477 - protein, 289 aa, Arabidopsis thaliana; identical to SEQ ID NO: 40676
  peptide (1)..(289): Ceres Seq. ID no. 13667683

SEQ ID NO: 108478 - DNA, 942 bp, Arabidopsis thaliana
  misc_feature (1)..(942): Ceres Seq. ID no. 13667688
  misc_feature (1)..(942): Ortholog of  Ceres SEQ ID NO 14302705 as cited in SEQ ID NO 56264
ggcacgaggacggagggcgatggacggcgtcatatcgccgccgctaaagtactggcagagagttcacaacaatggagtacgtaaaccctgaaggtcttcgattagatggtcgccgattcaacgagatgaggcaaatcgtagctgaagttggagttgtttctaaggctgacggttctgctgtcttcgagatgggtaataccaaagtaattgcagctgtttatggtccaagagagattcaaaacaagagccagcaaaagaagaacgaccatgcagtggtgttgtgtgagtatagtatggctcagtttagtactggtgaccgtagaagacagaaattcgacaggcgatcaacagagctatctcttgtcatccgtcagacaatggaagcttgcatattaaccgaattgatgcctcactctcagatcgatattttccttcaggttctacaagctgatggaggaacgagatcagcttgtatcaatgccgcgactctagctctagcagatgctggaattccaatgcgtgatctcgctgtttcctgtagtgctggatatttaaacagtactcctcttcttgatctgaactatgttgaagacagtgctggaggagctgatgtaaccgtcggtattctacctaaattagacaaagtgtcactccttcagatggatgccaagttaccgatggaaacatttgagacagtgtttgcattggcttctgaaggttgcaaagcaattgcagagagaatacgcgaggtacttcaagaaaacaccaaacagctagagtatcgccgagctgcataaactttagagttagagaaaaaaacgtaaagctccaagatttttgttaattagattttgctgttgtttgtggaagttgaggataaaaagctagtagtgcaaactctttttgggaaaaatgaatcaatttggtaaaaagatcaaactg

SEQ ID NO: 108479 - protein, 241 aa, Arabidopsis thaliana; identical to SEQ ID NO: 100860
  peptide (1)..(241): Ceres Seq. ID no. 13667689

SEQ ID NO: 108480 - protein, 223 aa, Arabidopsis thaliana; identical to SEQ ID NO: 100861
  peptide (1)..(223): Ceres Seq. ID no. 13667690

SEQ ID NO: 108481 - protein, 202 aa, Arabidopsis thaliana; identical to SEQ ID NO: 100862
  peptide (1)..(202): Ceres Seq. ID no. 13667691

SEQ ID NO: 108482 - DNA, 571 bp, Arabidopsis thaliana
  misc_feature (1)..(571): Ceres Seq. ID no. 13667695
  misc_feature (1)..(571): Ortholog of  Ceres SEQ ID NO 15168965 as cited in SEQ ID NO 20607
  misc_feature (1)..(571): Ortholog of  Ceres SEQ ID NO 13623385 as cited in SEQ ID NO 0
gtaacattcatcgagaatcatgacactggctctacacagggtcattggagatttcggaggaaggaaatgcaaggatatgcttacatcctaactcatccaggaacaccagcggtcttcttcgaccatatctctcggattatcaattccgagattgctgcacttctctctctcaggaacagacagaaactccactgtcggagtgaggtgaatatagacaagagtgagagagatgtgtatgcggctataatagatgaaaaggttgcaatgaagatcggaccagggcattatgaaccaccaaacggatcgcaaaactggtctgtagccgttgaaggcagagactacaaggtgtgggaaacatcttaagaagaaggttcccaatttttatgtgtatctagtagtaaataaaattgttcctggaggatatattatttcagggaataagattacctggaaatgttatatttagagtggattaaaaccagactagattgtccactttttcaatgctgagagatattcatattgttgtattggatgctgtaagtgtatgccatatatatatgaattaatt

SEQ ID NO: 108483 - protein, 120 aa, Arabidopsis thaliana
  peptide (1)..(120): Ceres Seq. ID no. 13667696
VTFIENHDTGSTQGHWRFRRKEMQGYAYILTHPGTPAVFFDHISRIINSEIAALLSLRNRQKLHCRSEVNIDKSERDVYAAIIDEKVAMKIGPGHYEPPNGSQNWSVAVEGRDYKVWETS

SEQ ID NO: 108484 - protein, 98 aa, Arabidopsis thaliana
  peptide (1)..(98): Ceres Seq. ID no. 13667697
MQGYAYILTHPGTPAVFFDHISRIINSEIAALLSLRNRQKLHCRSEVNIDKSERDVYAAIIDEKVAMKIGPGHYEPPNGSQNWSVAVEGRDYKVWETS

SEQ ID NO: 108485 - DNA, 1440 bp, Arabidopsis thaliana
  misc_feature (1)..(1440): Ceres Seq. ID no. 13667698
  misc_feature (1)..(1440): Ortholog of  Ceres SEQ ID NO 14314280 as cited in SEQ ID NO 57429
  misc_feature (1)..(1440): Ortholog of  Ceres SEQ ID NO 13595870 as cited in SEQ ID NO 62101
  misc_feature (1)..(1440): Ortholog of  Ceres SEQ ID NO 13590241 as cited in SEQ ID NO 63878
  misc_feature (1)..(1440): Ortholog of  Ceres SEQ ID NO 13657939 as cited in SEQ ID NO 66349
ctcacttttctcttcccccaccctcaaagatctctcaaagaatggcttccgcggctgttgcatcgatggttcttgaccctaaagcatcaccggccttgatggatctatccaccgcagacgaagaagatctctatggccgcctcaaatcgcttgaacgacaactagagttcaccgatatccaagaagaatatgtgaaagacgagcaaaagaatctcaaacgagagctgttacgagcacaagaagaggtcaaacgaattcaatccgtgcctttggtgataggtcagttcatggagatggtagatcagaacaacggcatcgtcggatctactactggctccaattactatgtcagaattctcagcacaatcaatagagaactcttaaagccttctgcttccgtcgctcttcaccgtcactccaacgcccttgttgatgttttgcctccggaggctgattctagcatctcccttctcagccaatctgagaagcctgacgtctcctacaatgatattggaggatgcgatattcagaaacaggaaattcgtgaggctgttgaattgcctcttacccaccacgagctttacaaacagattggtattgacccacctcgtggagtcttgctctatggacctcctggtactggaaagactatgttggctaaggctgttgccaatcacacaactgctgccttcattagggttgttggatccgagtttgtgcaaaagtatctcggcgagggacctcgtatggttcgtgatgtcttccgtcttgccaaggaaaatgctccagctatcatcttcattgatgaggtagatgccatcgctactgctaggtttgatgctcaaacaggagccgatagggaagttcagcgtattctcatggagcttcttaatcagatggatggatttgaccagaccgtgaatgtcaaggtcataatggcaacaaacagggcagacactctagatcctgctctcttacgtcctggaagacttgatcgtaagattgagttcccccttcctgatagacgtcaaaagaggcttgttttccaggtatgcacctccaaaatgaaccttagcgatgaggttgacttggaagactatgtttcacggcctgataaaattagcgctgctgagatagcagcaatttgccaggaagctggtatgcatgcggtgcgaaagaacagatatgtgatactacctaaggatttcgagaagggctaccgcgcaaatgttaagaagccagacacggactttgagttttacaagtgaagagaaagcagaagtggaaccagattatggctgttgttaaaattccagtgtgttttgagaattattaaggacatggaatcaaatttgcagttaaattaagaactaagttgcatctcctaatttctgtaactcgagttcacatttgtttttagtctatcagctttttacagtt

SEQ ID NO: 108486 - protein, 421 aa, Arabidopsis thaliana
  peptide (1)..(421): Ceres Seq. ID no. 13667699
HFSLPPPSKISQRMASAAVASMVLDPKASPALMDLSTADEEDLYGRLKSLERQLEFTDIQEEYVKDEQKNLKRELLRAQEEVKRIQSVPLVIGQFMEMVDQNNGIVGSTTGSNYYVRILSTINRELLKPSASVALHRHSNALVDVLPPEADSSISLLSQSEKPDVSYNDIGGCDIQKQEIREAVELPLTHHELYKQIGIDPPRGVLLYGPPGTGKTMLAKAVANHTTAAFIRVVGSEFVQKYLGEGPRMVRDVFRLAKENAPAIIFIDEVDAIATARFDAQTGADREVQRILMELLNQMDGFDQTVNVKVIMATNRADTLDPALLRPGRLDRKIEFPLPDRRQKRLVFQVCTSKMNLSDEVDLEDYVSRPDKISAAEIAAICQEAGMHAVRKNRYVILPKDFEKGYRANVKKPDTDFEFYK

SEQ ID NO: 108487 - protein, 408 aa, Arabidopsis thaliana; identical to SEQ ID NO: 40993
  peptide (1)..(408): Ceres Seq. ID no. 13667700

SEQ ID NO: 108488 - protein, 400 aa, Arabidopsis thaliana; identical to SEQ ID NO: 40994
  peptide (1)..(400): Ceres Seq. ID no. 13667701

SEQ ID NO: 108489 - DNA, 1225 bp, Arabidopsis thaliana
  misc_feature (1)..(1225): Ceres Seq. ID no. 13667702
  misc_feature (1)..(1225): Ortholog of  Ceres SEQ ID NO 15176230 as cited in SEQ ID NO 58796
  misc_feature (1)..(1225): Ortholog of  Ceres SEQ ID NO 14308156 as cited in SEQ ID NO 59006
  misc_feature (1)..(1225): Ortholog of  Ceres SEQ ID NO 13596321 as cited in SEQ ID NO 67976
cgcgtccgctcactgtctctcttcttcaatccatgtcttcaacacaagaagcgtctgttactgatttgcccgtgaagagacctagagaagcagaggaggacaataacggcggcgccatggaaacagagaacggtggaggagagataaaggagccttcttgtatgtcctctattattcctggatggttctctgagattagtcctatgtggccaggagaagcacattctctcaaggtagagaagattctattccaagggaaatcagattaccaggatgttattgttttccagtctgcaacatatggaaaggttttggttttggatggagtgattcaactcactgagagagatgaatgtgcgtatcaagaaatgatcactcatcttcctttgtgctctatctccaaccccaaaaaggtactggtgattggaggaggagatggaggagtcctgagggaagtggcacgtcatagttctgttgagcagattgacatttgtgaaatagataaaatggtggttgatgtggctaagcagtatttccctaatgtagcagttggatacgaggatcctcgtgtcaacctcatcattggcgatggtgttgctttcttgaagaacgctgctgaaggaacctatgatgcagttattgttgattcatctgatccaatcggtccagcaaaagagctatttgagaaacctttctttgagtcagtgaatagagctcttcgtcctggtggagttgtgtgcacacaagctgaaagcttgtggcttcacatggatatcattgaagacattgtttctaattgccgtgacatctttaaaggatctgttaactacgcttggaccagtgttccaacttacccgagtggagtcattggattcatgctttgttcatctgaaggaccacaagtcgatttcaagaagccagtgagtctaatcgatactgatgaaagctctatcaaatcacactgtcccttgaagtattacaacgctgagattcactcagctgctttctgcttgccctcttttgctaagaaggtgattgattcgaaagccaactagaaaagagaagagaaatcatttgctttagagaaacttcatgtggaagtgataatatgatgatacaatgatcctttggaaaaaaataaagaagttttaatttttagaatgtaatgttctttcacctgcaatgttatgtgactgcactgagctatcaatctctttttataagc

SEQ ID NO: 108490 - protein, 350 aa, Arabidopsis thaliana
  peptide (1)..(350): Ceres Seq. ID no. 13667703
RPLTVSLLQSMSSTQEASVTDLPVKRPREAEEDNNGGAMETENGGGEIKEPSCMSSIIPGWFSEISPMWPGEAHSLKVEKILFQGKSDYQDVIVFQSATYGKVLVLDGVIQLTERDECAYQEMITHLPLCSISNPKKVLVIGGGDGGVLREVARHSSVEQIDICEIDKMVVDVAKQYFPNVAVGYEDPRVNLIIGDGVAFLKNAAEGTYDAVIVDSSDPIGPAKELFEKPFFESVNRALRPGGVVCTQAESLWLHMDIIEDIVSNCRDIFKGSVNYAWTSVPTYPSGVIGFMLCSSEGPQVDFKKPVSLIDTDESSIKSHCPLKYYNAEIHSAAFCLPSFAKKVIDSKAN

SEQ ID NO: 108491 - protein, 340 aa, Arabidopsis thaliana; identical to SEQ ID NO: 90633
  peptide (1)..(340): Ceres Seq. ID no. 13667704

SEQ ID NO: 108492 - protein, 312 aa, Arabidopsis thaliana; identical to SEQ ID NO: 90634
  peptide (1)..(312): Ceres Seq. ID no. 13667705

SEQ ID NO: 108493 - DNA, 886 bp, Arabidopsis thaliana
  misc_feature (1)..(886): Ceres Seq. ID no. 13667714
  misc_feature (1)..(886): Ortholog of  Ceres SEQ ID NO 13595187 as cited in SEQ ID NO 56052
  misc_feature (1)..(886): Ortholog of  Ceres SEQ ID NO 13662053 as cited in SEQ ID NO 61547
  misc_feature (1)..(886): Ortholog of  Ceres SEQ ID NO 13624283 as cited in SEQ ID NO 0
agtaatttagaaacaaattgatcccttaaccttcttcaccaacatctctcttacactcaacaagagatcatatcatgtcctctccaagagaaagaggaaagagtttgatggaatcatcaggatcagagccaccggtgacaccaagccgttacgagtcgcagaagagacgtgactggaacactttcggacagtacttgaagaatcagagaccgcctgtgccgatgtctcactgcagctgtaaccacgtgcttgatttcctcaggtacttagaccagttcggtaagacaaaggtgcacgtgcctggctgtatgttctacggccagcctgagccaccagctccttgcacgtgccctctcagacaagcttggggaagtcttgacgctttgatcggacggctgagagcggcttacgaggagaacggtggacctccggagactaaccctttcgctagcggagcgataagggtttatctgagggaggttagggagtgtcaggctaaggctagagggattccttacaagaagaagaagaagaagaagccaacgccggagatgggaggtgggagagaggactcttcttcctcctcctcttccttcagcttctcttaagagattctccatcgtcgtgaaagactttgtgaacttggcaggatcagtaagtctcaaagagggatcaaatgtaaaagagacctcaaatctatctactggtatcttcaacatatctttcgggaccatttttgcagctcttcgtcccctcctcttcatttccgcagatctccgtcgtcataaatatcttcatctattctcttattaagctctattcatatttattctcttattaagcacttttcttttgaataaagtaagtgtaaagagtttatatattg

SEQ ID NO: 108494 - protein, 177 aa, Arabidopsis thaliana; identical to SEQ ID NO: 106285
  peptide (1)..(177): Ceres Seq. ID no. 13667715

SEQ ID NO: 108495 - protein, 166 aa, Arabidopsis thaliana; identical to SEQ ID NO: 106286
  peptide (1)..(166): Ceres Seq. ID no. 13667716

SEQ ID NO: 108496 - protein, 128 aa, Arabidopsis thaliana; identical to SEQ ID NO: 106287
  peptide (1)..(128): Ceres Seq. ID no. 13667717

SEQ ID NO: 108497 - DNA, 661 bp, Arabidopsis thaliana
  misc_feature (1)..(661): Ceres Seq. ID no. 13667733
  misc_feature (1)..(661): Ortholog of  Ceres SEQ ID NO 12610954 as cited in SEQ ID NO 55930
  misc_feature (1)..(661): Ortholog of  Ceres SEQ ID NO 12625335 as cited in SEQ ID NO 63326
  misc_feature (1)..(661): Ortholog of  Ceres SEQ ID NO 12566590 as cited in SEQ ID NO 0
  misc_feature (1)..(661): Ortholog of  Ceres SEQ ID NO 14305152 as cited in SEQ ID NO 0
  misc_feature (1)..(661): Ortholog of  Ceres SEQ ID NO 15179949 as cited in SEQ ID NO 0
ccacgcgtccgctttcatttgtctcctttcgtcaactccacagagatctcctcatggctccaattgctgtcggcgatgtcgtaccagacggaactatctccttcttcgatgagaatgatcaacttcagaccgcctccgttcactctctcgccgccggtaaaaaagtcattctctttggtgttcctggtgctttcactcccacttgcagcatgaagcatgttcctgggttcattgagaaagcagaggagctgaagtcaaagggtgttgatgagatcatttgctttagcgtgaacgatccgtttgtgatgaaagcatggggaaaaacatacccagagaacaaacatgtgaagtttgtagctgatgggtctggagaatacacacaccttctcggacttgagcttgaccttaaagacaagggtcttggtgttaggtcaaggagatttgctctgttacttgatgatctcaaagtgactgtagccaatgtcgaatctggtggcgaattcacagtttccagcgccgatgatatcctcaaggctctctaagaaatgtaccacttgtgttgtctatgtaaaccgctgtatgtgtagtagaggattctatagcttgttctcagacattaaccaaggttgtaataaagcggtttcattgtgacttgtttggc

SEQ ID NO: 108498 - protein, 179 aa, Arabidopsis thaliana
  peptide (1)..(179): Ceres Seq. ID no. 13667734
TRPLSFVSFRQLHRDLLMAPIAVGDVVPDGTISFFDENDQLQTASVHSLAAGKKVILFGVPGAFTPTCSMKHVPGFIEKAEELKSKGVDEIICFSVNDPFVMKAWGKTYPENKHVKFVADGSGEYTHLLGLELDLKDKGLGVRSRRFALLLDDLKVTVANVESGGEFTVSSADDILKAL

SEQ ID NO: 108499 - protein, 162 aa, Arabidopsis thaliana; identical to SEQ ID NO: 81388
  peptide (1)..(162): Ceres Seq. ID no. 13667735

SEQ ID NO: 108500 - protein, 110 aa, Arabidopsis thaliana; identical to SEQ ID NO: 81389
  peptide (1)..(110): Ceres Seq. ID no. 13667736

SEQ ID NO: 108501 - DNA, 1690 bp, Arabidopsis thaliana
  misc_feature (1)..(1690): Ceres Seq. ID no. 13667745
  misc_feature (1)..(1690): Ortholog of  Ceres SEQ ID NO 14311305 as cited in SEQ ID NO 53731
  misc_feature (1)..(1690): Ortholog of  Ceres SEQ ID NO 13501807 as cited in SEQ ID NO 67558
ctagtcagggttcttctctatctctctcgccaaagaatcgtacttcttctctcaggttttaaggagatgggatctggtcaatggcacgttgagaaaaggtctacgtttaggaatgattcgtttgtgagagaatatggtatagttccagaaactggttgtctttcaatcatagttcttggtgcttctggtgatcttgctaagaagaagacttttcctgctctttttaacttataccgtcagggatttctcaatccagatgaagttcatattttcgggtatgcgaggactaagatttctgatgaagagctgagagataggattcgtggatatcttgttgatgagaagaatgctgagcaagctgaagctttgtcaaagtttctgcagctgattaagtatgtgagtggcccttatgatgctgaggaggggttccagagattagacaaggcaatttcagagcacgaaatctccaaaaatagtactgaagggtcttctagaagactgttttatcttgcacttccaccgtctgtttatccttctgtatgcaagatgatcaagacgtgctgcatgaacaaatctgatcttggtggatggacacggattgttgtggagaagccatttggcaaggaccttgaatctgcagagcaactgagttctcagattggagagttatttgatgaatcacagatctatcgtatagaccattatcttgggaaggaattagttcaaaacatgttggtcctccggtttgcaaatcgctttttcttgccactttggaaccgtgacaatatcgagaacgtgcagattgttttcagggaagattttggaactgaagggcgtggcggatattttgacgaatatggaataatccgtgatattattcaaaaccatctgctacaggttctttgccttgttgccatggagaaaccaatatctcttaaacctgagcatatccgggatgagaaagtgaaggtgcttcaatctgtggttccgataagcgatgacgaggtagttcttggacaatacgaaggatatagggatgatgatactgttccaaacgactcaaacactccaacatttgccacaacaatccttcgcatacacaacgaaagatgggaaggtgttccatttatattaaaggccggaaaatcgttgaattcaaggaaggcagaaattcgcattcaattcaaggatgtcccaggcgacatattcagatgtcaaaagcaaggaaggaacgagtttgtgatacgcttgcaaccttcagaggcaatgtacatgaaactaactgttaagcaaccaggtctagatatgaatactgtgcaaagtgaactagacttgtcgtatgggcaacggtatcaaggtgtcgctatccctgaggcatacgagcgcttaattcttgacacaatcaaaggcgatcaacaacatttcgttcgtagagacgaattaaaggttgcgtgggagatcttcacgccgctactccacaggatcgacaaaggagaagtaaagtcaatcccatacaaaccaggaagccgaggaccgaaagaagctgatcagctactagagaaagctggttatcttcagactcacggctatatctggatccctcctacactataaaaccctacatatatataaatacacaatacatgtatctacatgtatatgtataaaaatttatgctgaatagtccctc

SEQ ID NO: 108502 - protein, 537 aa, Arabidopsis thaliana
  peptide (1)..(537): Ceres Seq. ID no. 13667746
LVRVLLYLSRQRIVLLLSGFKEMGSGQWHVEKRSTFRNDSFVREYGIVPETGCLSIIVLGASGDLAKKKTFPALFNLYRQGFLNPDEVHIFGYARTKISDEELRDRIRGYLVDEKNAEQAEALSKFLQLIKYVSGPYDAEEGFQRLDKAISEHEISKNSTEGSSRRLFYLALPPSVYPSVCKMIKTCCMNKSDLGGWTRIVVEKPFGKDLESAEQLSSQIGELFDESQIYRIDHYLGKELVQNMLVLRFANRFFLPLWNRDNIENVQIVFREDFGTEGRGGYFDEYGIIRDIIQNHLLQVLCLVAMEKPISLKPEHIRDEKVKVLQSVVPISDDEVVLGQYEGYRDDDTVPNDSNTPTFATTILRIHNERWEGVPFILKAGKSLNSRKAEIRIQFKDVPGDIFRCQKQGRNEFVIRLQPSEAMYMKLTVKQPGLDMNTVQSELDLSYGQRYQGVAIPEAYERLILDTIKGDQQHFVRRDELKVAWEIFTPLLHRIDKGEVKSIPYKPGSRGPKEADQLLEKAGYLQTHGYIWIPPTL

SEQ ID NO: 108503 - protein, 515 aa, Arabidopsis thaliana
  peptide (1)..(515): Ceres Seq. ID no. 13667747
MGSGQWHVEKRSTFRNDSFVREYGIVPETGCLSIIVLGASGDLAKKKTFPALFNLYRQGFLNPDEVHIFGYARTKISDEELRDRIRGYLVDEKNAEQAEALSKFLQLIKYVSGPYDAEEGFQRLDKAISEHEISKNSTEGSSRRLFYLALPPSVYPSVCKMIKTCCMNKSDLGGWTRIVVEKPFGKDLESAEQLSSQIGELFDESQIYRIDHYLGKELVQNMLVLRFANRFFLPLWNRDNIENVQIVFREDFGTEGRGGYFDEYGIIRDIIQNHLLQVLCLVAMEKPISLKPEHIRDEKVKVLQSVVPISDDEVVLGQYEGYRDDDTVPNDSNTPTFATTILRIHNERWEGVPFILKAGKSLNSRKAEIRIQFKDVPGDIFRCQKQGRNEFVIRLQPSEAMYMKLTVKQPGLDMNTVQSELDLSYGQRYQGVAIPEAYERLILDTIKGDQQHFVRRDELKVAWEIFTPLLHRIDKGEVKSIPYKPGSRGPKEADQLLEKAGYLQTHGYIWIPPTL

SEQ ID NO: 108504 - protein, 355 aa, Arabidopsis thaliana
  peptide (1)..(355): Ceres Seq. ID no. 13667748
MIKTCCMNKSDLGGWTRIVVEKPFGKDLESAEQLSSQIGELFDESQIYRIDHYLGKELVQNMLVLRFANRFFLPLWNRDNIENVQIVFREDFGTEGRGGYFDEYGIIRDIIQNHLLQVLCLVAMEKPISLKPEHIRDEKVKVLQSVVPISDDEVVLGQYEGYRDDDTVPNDSNTPTFATTILRIHNERWEGVPFILKAGKSLNSRKAEIRIQFKDVPGDIFRCQKQGRNEFVIRLQPSEAMYMKLTVKQPGLDMNTVQSELDLSYGQRYQGVAIPEAYERLILDTIKGDQQHFVRRDELKVAWEIFTPLLHRIDKGEVKSIPYKPGSRGPKEADQLLEKAGYLQTHGYIWIPPTL

SEQ ID NO: 108505 - DNA, 1839 bp, Arabidopsis thaliana
  misc_feature (1)..(1839): Ceres Seq. ID no. 13667749
  misc_feature (1)..(1839): Ortholog of  Ceres SEQ ID NO 14311305 as cited in SEQ ID NO 53731
  misc_feature (1)..(1839): Ortholog of  Ceres SEQ ID NO 13501807 as cited in SEQ ID NO 67558
ctacgtcagggtttggttagagtgttaaaaaactattggaagatgggttctggtcaatggcatatggagaagaggtctactttaaagaatgattcgtttgtaaaagaatacaatccaatcacggaaactgggagtctctctatcattgttcttggtgcttctggtgatcttgctaagaagaagacttttcctgcacttttcaatctatttcatcagggatttcttaatccagatgaagttcatatatttggatatgcaaggagtaagattactgatgaggagcttagagataaaatccgcggatatcttgttgatgagaagaatgcatctaagaaaacagaagctttgtccaagtttctaaagctgattaagtatgtgagtggaccttatgattctgaggaagggtttaagagattagacaaggcgattttggagcacgagatatctaaaaagactgctgaaggatcttcgaggagattgttttatcttgcacttcctccgtctgtataccctcctgtaagcaagatgatcaaggcatggtgcactaacaaatctgatcttggtggatggactaggattgttgttgagaaaccatttggaaaggatttggaatctgcagagcagctgagttctcagattggagccttgtttgaagaaccacagatttatcgtattgatcactatctgggaaaagagttagttcaaaacatgttggttcttcggtttgccaatcgcttgtttttgccactatggaaccgcgacaatattgcaaacgtacagatcgttttcagagaagattttggaactgaaggtcgcggtggatattttgatgaatacggaatcattcgtgatattattcaaaaccacttgctccaggttctttgccttgtcgccatggagaaaccaatctctcttaaacccgagcacatccgggatgagaaagtgaaggttcttcaatctgtgattcccataaaagatgaagaggtggttcttggacaatatgaaggatatagagatgatccaactgttccaaatgactcaaacactccaacgtttgccacaacaattcttcgcattaacaatgaaagatgggaaggtgttccttttatactgaaggccggaaaggcaatgagttcaaagaaggcagatattcgcattcagtttaaagatgttcctggcgacatattcaaatgtcaaaaccaagggaggaacgagtttgttatacgcttgcagccttcagaggccatgtacatgaagctaactgtgaagcaaccgggtctggagatgcaaaccgtgcagagtgaactagacctatcgtacaagcagcgttaccaagatgtctcaattccagaggcttacgaacgccttattcttgacacaatcagaggcgaccaacaacactttgttcgcagagacgaattaaaggcagcttgggaaatcttcactccactgcttcacaggatcgacaagggagaagtgaaatcggtcccatacaaacaaggtagccgtggcccagcggaagcagatcagctacttaagaaagctggttatatgcagactcatggctacatttggatccctcctacattgtaaatggtataatcatagagatgatgatgatgagtacacacaaaataagagggttttttttcttttttttccttgcttgctgaataaaaactcttcaccagtttggagtttgtttaagtgaatcttatgtatactagtgatcttcactaggacattgtttgtttatgccttgtagtttttgttgtactagtcccttgttttctttttttacataatgcaaaacagctttgtggaaaagctaattaaatt

SEQ ID NO: 108506 - protein, 530 aa, Arabidopsis thaliana
  peptide (1)..(530): Ceres Seq. ID no. 13667750
LRQGLVRVLKNYWKMGSGQWHMEKRSTLKNDSFVKEYNPITETGSLSIIVLGASGDLAKKKTFPALFNLFHQGFLNPDEVHIFGYARSKITDEELRDKIRGYLVDEKNASKKTEALSKFLKLIKYVSGPYDSEEGFKRLDKAILEHEISKKTAEGSSRRLFYLALPPSVYPPVSKMIKAWCTNKSDLGGWTRIVVEKPFGKDLESAEQLSSQIGALFEEPQIYRIDHYLGKELVQNMLVLRFANRLFLPLWNRDNIANVQIVFREDFGTEGRGGYFDEYGIIRDIIQNHLLQVLCLVAMEKPISLKPEHIRDEKVKVLQSVIPIKDEEVVLGQYEGYRDDPTVPNDSNTPTFATTILRINNERWEGVPFILKAGKAMSSKKADIRIQFKDVPGDIFKCQNQGRNEFVIRLQPSEAMYMKLTVKQPGLEMQTVQSELDLSYKQRYQDVSIPEAYERLILDTIRGDQQHFVRRDELKAAWEIFTPLLHRIDKGEVKSVPYKQGSRGPAEADQLLKKAGYMQTHGYIWIPPTL

SEQ ID NO: 108507 - protein, 516 aa, Arabidopsis thaliana
  peptide (1)..(516): Ceres Seq. ID no. 13667751
MGSGQWHMEKRSTLKNDSFVKEYNPITETGSLSIIVLGASGDLAKKKTFPALFNLFHQGFLNPDEVHIFGYARSKITDEELRDKIRGYLVDEKNASKKTEALSKFLKLIKYVSGPYDSEEGFKRLDKAILEHEISKKTAEGSSRRLFYLALPPSVYPPVSKMIKAWCTNKSDLGGWTRIVVEKPFGKDLESAEQLSSQIGALFEEPQIYRIDHYLGKELVQNMLVLRFANRLFLPLWNRDNIANVQIVFREDFGTEGRGGYFDEYGIIRDIIQNHLLQVLCLVAMEKPISLKPEHIRDEKVKVLQSVIPIKDEEVVLGQYEGYRDDPTVPNDSNTPTFATTILRINNERWEGVPFILKAGKAMSSKKADIRIQFKDVPGDIFKCQNQGRNEFVIRLQPSEAMYMKLTVKQPGLEMQTVQSELDLSYKQRYQDVSIPEAYERLILDTIRGDQQHFVRRDELKAAWEIFTPLLHRIDKGEVKSVPYKQGSRGPAEADQLLKKAGYMQTHGYIWIPPTL

SEQ ID NO: 108508 - protein, 509 aa, Arabidopsis thaliana
  peptide (1)..(509): Ceres Seq. ID no. 13667752
MEKRSTLKNDSFVKEYNPITETGSLSIIVLGASGDLAKKKTFPALFNLFHQGFLNPDEVHIFGYARSKITDEELRDKIRGYLVDEKNASKKTEALSKFLKLIKYVSGPYDSEEGFKRLDKAILEHEISKKTAEGSSRRLFYLALPPSVYPPVSKMIKAWCTNKSDLGGWTRIVVEKPFGKDLESAEQLSSQIGALFEEPQIYRIDHYLGKELVQNMLVLRFANRLFLPLWNRDNIANVQIVFREDFGTEGRGGYFDEYGIIRDIIQNHLLQVLCLVAMEKPISLKPEHIRDEKVKVLQSVIPIKDEEVVLGQYEGYRDDPTVPNDSNTPTFATTILRINNERWEGVPFILKAGKAMSSKKADIRIQFKDVPGDIFKCQNQGRNEFVIRLQPSEAMYMKLTVKQPGLEMQTVQSELDLSYKQRYQDVSIPEAYERLILDTIRGDQQHFVRRDELKAAWEIFTPLLHRIDKGEVKSVPYKQGSRGPAEADQLLKKAGYMQTHGYIWIPPTL

SEQ ID NO: 108509 - DNA, 829 bp, Arabidopsis thaliana
  misc_feature (1)..(829): Ceres Seq. ID no. 13667753
  misc_feature (1)..(829): Ortholog of  Ceres SEQ ID NO 13638595 as cited in SEQ ID NO 52050
  misc_feature (1)..(829): Ortholog of  Ceres SEQ ID NO 14301870 as cited in SEQ ID NO 61501
  misc_feature (1)..(829): Ortholog of  Ceres SEQ ID NO 12583993 as cited in SEQ ID NO 68098
agaaaagaaaagtagagtactatcttcctcttaaaccaaccattcaaaatgttgcgtactatcttcctcttatctcttctctttgctctatccaatgcctctgttcaagatttctgtgtcgcaaacctgaaacgcgctgaaacccctgcgggttacccttgcattcgtcccattcatgtcaaagctacagactttgtcttctctggcttaggcactcctggaaacactacaaacatcatcaacgccgctgtcacacccgctttcgcagctcagttcccgggtctgaacggtctaggcctctctacagctagacttgacttagctcctaaaggtgtgatcccaatgcacactcaccctggtgcctctgaggttctctttgtccttactggctccattaccgctgggtttgtctcctcggcaaacgctgtctacgtgcagacactcaaaccaggacaggtcatggttttcccacagggcttgcttcatttccagatcaacgcgggaaaatcctctgcttcagccgttgtcactttcaacagcgctaatccgggtctgcagattctcgacttcgcactctttgctaacagtcttcccactgaactcgtcgtgggtactactttccttgacgccactacagtcaagaagctaaagggtgttcttggaggaactggctaaaaaaagacttaggactactccttgactaaaacaccaaaacctgtttcttcatctttttttctctttaattgattcttgtcttctctgttttgtgtgccttgtaattcttcaaaacctgtcaaaattgttacattgtatgtgagttttttcaatt

SEQ ID NO: 108510 - protein, 208 aa, Arabidopsis thaliana; identical to SEQ ID NO: 23207
  peptide (1)..(208): Ceres Seq. ID no. 13667754

SEQ ID NO: 108511 - protein, 110 aa, Arabidopsis thaliana; identical to SEQ ID NO: 31047
  peptide (1)..(110): Ceres Seq. ID no. 13667755

SEQ ID NO: 108512 - DNA, 1155 bp, Arabidopsis thaliana
  misc_feature (1)..(1155): Ceres Seq. ID no. 13667767
  misc_feature (1)..(1155): Ortholog of  Ceres SEQ ID NO 15175048 as cited in SEQ ID NO 59975
  misc_feature (1)..(1155): Ortholog of  Ceres SEQ ID NO 13597333 as cited in SEQ ID NO 63974
  misc_feature (1)..(1155): Ortholog of  Ceres SEQ ID NO 13599307 as cited in SEQ ID NO 0
  misc_feature (1)..(1155): Ortholog of  Ceres SEQ ID NO 15179517 as cited in SEQ ID NO 0
aaaaaaaaaaaaaaaaaaacatccaacaccaaagacaatggagatgagtttgcgtctcgcttcatcttcaacctcaaacccaatttgtctactaaaccctggaaaaaaccttaatttcccaatccgaaaccatagaatccctaaaacttcgaaacccttttgcgttaggtcttcaatgagcttgtctaaaccacccagacaaaccttatctagtaactgggatgtatctagcttctccattgattccgttgctcaatctccttcaagactcccaagtttcgaagaactcgataccaccaacatgttgctccgtcaaagaatcgtctttttgggttctcaggttgatgatatgacggcggatttggttataagtcagctattgttactagatgctgaggactcagaaagagacattacgctttttatcaattcacccggtggatctattactgctgggatgggaatatatgatgcaatgaaacaatgtaaggcggatgtatctactgtttgcttagggttagctgcatctatgggtgcgtttcttcttgcttctggttcaaaagggaaacggtattgtatgcctaactctaaagttatgatccatcagccacttggtactgctggaggcaaagcaacggaaatgagcatacgtataagagaaatgatgtaccacaagattaaacttaacaaaatcttctctagaatcactgggaagcctgaatcagagatcgaaagtgacacagaccgtgataacttcttgaatccatgggaggcgaaagaatatggtttgatcgacgctgtaatcgatgatgggaaaccgggactaatcgctccaattggagatggtactcctcctcctaaaaccaaagtctgggatctttggaaagtcgaaggaaccaaggaagacaacactaacttgccatctgagcgctccatgacacagaatggttatgccgccattgaatagaactgttgttgcagcgtttacgccttttatatgttattctggtggtacctgtaaccatataacgttgcatttcctgtgtttgtaccatttctctgatagatttttggaataatttgaaggcaaaagatagattattgtgtagagagctacaaatttaatgataaattgatcatcagcactggaaagct

SEQ ID NO: 108513 - protein, 321 aa, Arabidopsis thaliana
  peptide (1)..(321): Ceres Seq. ID no. 13667768
KKKKKKHPTPKTMEMSLRLASSSTSNPICLLNPGKNLNFPIRNHRIPKTSKPFCVRSSMSLSKPPRQTLSSNWDVSSFSIDSVAQSPSRLPSFEELDTTNMLLRQRIVFLGSQVDDMTADLVISQLLLLDAEDSERDITLFINSPGGSITAGMGIYDAMKQCKADVSTVCLGLAASMGAFLLASGSKGKRYCMPNSKVMIHQPLGTAGGKATEMSIRIREMMYHKIKLNKIFSRITGKPESEIESDTDRDNFLNPWEAKEYGLIDAVIDDGKPGLIAPIGDGTPPPKTKVWDLWKVEGTKEDNTNLPSERSMTQNGYAAIE

SEQ ID NO: 108514 - protein, 309 aa, Arabidopsis thaliana
  peptide (1)..(309): Ceres Seq. ID no. 13667769
MEMSLRLASSSTSNPICLLNPGKNLNFPIRNHRIPKTSKPFCVRSSMSLSKPPRQTLSSNWDVSSFSIDSVAQSPSRLPSFEELDTTNMLLRQRIVFLGSQVDDMTADLVISQLLLLDAEDSERDITLFINSPGGSITAGMGIYDAMKQCKADVSTVCLGLAASMGAFLLASGSKGKRYCMPNSKVMIHQPLGTAGGKATEMSIRIREMMYHKIKLNKIFSRITGKPESEIESDTDRDNFLNPWEAKEYGLIDAVIDDGKPGLIAPIGDGTPPPKTKVWDLWKVEGTKEDNTNLPSERSMTQNGYAAIE

SEQ ID NO: 108515 - protein, 307 aa, Arabidopsis thaliana
  peptide (1)..(307): Ceres Seq. ID no. 13667770
MSLRLASSSTSNPICLLNPGKNLNFPIRNHRIPKTSKPFCVRSSMSLSKPPRQTLSSNWDVSSFSIDSVAQSPSRLPSFEELDTTNMLLRQRIVFLGSQVDDMTADLVISQLLLLDAEDSERDITLFINSPGGSITAGMGIYDAMKQCKADVSTVCLGLAASMGAFLLASGSKGKRYCMPNSKVMIHQPLGTAGGKATEMSIRIREMMYHKIKLNKIFSRITGKPESEIESDTDRDNFLNPWEAKEYGLIDAVIDDGKPGLIAPIGDGTPPPKTKVWDLWKVEGTKEDNTNLPSERSMTQNGYAAIE

SEQ ID NO: 108516 - DNA, 1210 bp, Arabidopsis thaliana
  misc_feature (1)..(1210): Ceres Seq. ID no. 13667771
  misc_feature (1)..(1210): Ortholog of  Ceres SEQ ID NO 12484482 as cited in SEQ ID NO 53324
  misc_feature (1)..(1210): Ortholog of  Ceres SEQ ID NO 15176234 as cited in SEQ ID NO 54949
  misc_feature (1)..(1210): Ortholog of  Ceres SEQ ID NO 14314507 as cited in SEQ ID NO 59337
ccacgcgtccgaaacactaaaagtagaagaaaaatggcgactcttaaggtttctgattctgttcctgctccttctgatgatgctgagcaattgagaaccgcttttgaaggatggggtacgaacgaggacttgatcatatcaatcttggctcacagaagtgctgaacagaggaaagtcatcaggcaagcataccacgaaacctacggcgaagaccttctcaagactcttgacaaggagctctctaacgatttcgagagagctatcttgttgtggactcttgaacccggtgagcgtgatgctttattggctaatgaagctacaaaaagatggacttcaagcaaccaagttcttatggaagttgcttgcacaaggacatcaacgcagctgcttcacgctaggcaagcttaccatgctcgctacaagaagtctcttgaagaggacgttgctcaccacactaccggtgacttcagaaagcttttggtttctcttgttacctcatacaggtacgaaggagatgaagtgaacatgacattggctaagcaagaagctaagctggtccatgagaaaatcaaggacaagcactacaatgatgaggatgttattagaatcttgtccacaagaagcaaagctcagatcaatgctacttttaaccgttaccaagatgatcatggcgaggaaattctcaagagtcttgaggaaggagatgatgatgacaagttgccttgcacttttgaggtcaaccattcagtgcttgacaagaccagagctttactttgtcgatgttcttcgttcagcaatcaacaaaactggaactgatgaaggagcactcactagaattgtgaccacaagagctgagattgacttgaaggtcattggagaggagtaccagcgcaggaacagcattcctttggagaaagctattaccaaagacactcgtggagattacgagaagatgctcgtcgcacttctcggtgaagatgatgcttaatcaatcaatcctccacagagaaacataagctgctctacagcttctgttatctcttatctccctctctctctctttgatgagtttcaaatcgtttgattttgtttctacaaaaaccttgtttgtttctgttgtgtgttttgagttcctaaataatgcaaaagagagagacagagagaaccagtgtggtctcttaagttatatatatatgaagagcattggcct

SEQ ID NO: 108517 - protein, 271 aa, Arabidopsis thaliana
  peptide (1)..(271): Ceres Seq. ID no. 13667772
PRVRNTKSRRKMATLKVSDSVPAPSDDAEQLRTAFEGWGTNEDLIISILAHRSAEQRKVIRQAYHETYGEDLLKTLDKELSNDFERAILLWTLEPGERDALLANEATKRWTSSNQVLMEVACTRTSTQLLHARQAYHARYKKSLEEDVAHHTTGDFRKLLVSLVTSYRYEGDEVNMTLAKQEAKLVHEKIKDKHYNDEDVIRILSTRSKAQINATFNRYQDDHGEEILKSLEEGDDDDKLPCTFEVNHSVLDKTRALLCRCSSFSNQQNWN

SEQ ID NO: 108518 - protein, 260 aa, Arabidopsis thaliana
  peptide (1)..(260): Ceres Seq. ID no. 13667773
MATLKVSDSVPAPSDDAEQLRTAFEGWGTNEDLIISILAHRSAEQRKVIRQAYHETYGEDLLKTLDKELSNDFERAILLWTLEPGERDALLANEATKRWTSSNQVLMEVACTRTSTQLLHARQAYHARYKKSLEEDVAHHTTGDFRKLLVSLVTSYRYEGDEVNMTLAKQEAKLVHEKIKDKHYNDEDVIRILSTRSKAQINATFNRYQDDHGEEILKSLEEGDDDDKLPCTFEVNHSVLDKTRALLCRCSSFSNQQNWN

SEQ ID NO: 108519 - protein, 154 aa, Arabidopsis thaliana
  peptide (1)..(154): Ceres Seq. ID no. 13667774
MEVACTRTSTQLLHARQAYHARYKKSLEEDVAHHTTGDFRKLLVSLVTSYRYEGDEVNMTLAKQEAKLVHEKIKDKHYNDEDVIRILSTRSKAQINATFNRYQDDHGEEILKSLEEGDDDDKLPCTFEVNHSVLDKTRALLCRCSSFSNQQNWN

SEQ ID NO: 108520 - DNA, 1619 bp, Arabidopsis thaliana
  misc_feature (1)..(1619): Ceres Seq. ID no. 13667775
  misc_feature (1)..(1619): Ortholog of  Ceres SEQ ID NO 13597269 as cited in SEQ ID NO 63932
gtgtttcttctcagcaggactaaaaggaaaaaaggaaatcgattgctaatgtcgggtgagaaacaagcggaggagtcaatagtagtctccggggatgaggaggtggccggtagaaaagtggaagattcagcggcggaggaggatattgacggcaacgggggcaatggatttagtatgaagagcttcctctggcatggcgggtccgcttgggacgcctggtttagctgtgcatcaaatcaagtggcacaagtgctgttgacgctgccgtattcgttntcgcagttgggaatgttatcaggaatattgcttcaaatattctatgggttaatgggatcttggactgcttatctcatcagtgttctttacgtcgagtatcgtgcccgtatggagaaacaagaagccaaatccttcaaaaaccacgttattcaatggtttgaagtgcttgatgggctgctgggtccgtactggaaagcagcggggctcgcatttaattgcaccttcttgttattcggatcagtcatccaactcattgcttgtgctagcaatatatattacataaacgataggttagacaagaggacatggacttatatatttggggcttgctgtgccacgaccgttttcataccatctttccacaattaccgtatttggtctttcctcggccttggcatgaccacctacaccgcttggtacctcaccatcgcctcttttctccatggtcaggcggagggtgtgacacattccggtccaaccaagcttgtgttgtactttaccggagccaccaacatcctctataccttcggtggacacgctgtgaccgtggaaataatgcatgcgatgtggaaaccaaggaagtttaagagcatctacttgatggcaactctgtacgtcttcacattaacgcttccgtcagcctccgccctctactgggctttcggcgaccaacttctcaaccactcaaacgctttctctctcctccctaaaacgcgtttccgtgacaccgccgttatcctcatgctcatccatcagtttataacgttcgggtttgcgtgtacaccattgtacttcgtatgggaaaaagcgatcggaatgcaccacacaaagagcttatgtctaagagcgctggtgaggctaccgtgtgttccgatatggttttggccaatcatctttcctttttcggccattaactcggcagttggagccttacttgttaccttcaccgtctatatcatccctgccttagcccacatgctcacgtaccgcaccgcctctgccgccgaacgcgcggagaaaccaccgttttttatccctagctgggctggagtttacgtgataaacgctttcatagtggtttgggtcctagttctcgggttcgggtttggcggatgggccagtatgaccaacttcatcaggcaaattgatacttttggcctctttgccaaatgctaccaatgcaaaccacctccagctccgatcgccgccggagctcaccaccgccgttagttaacgtaagcgacgtgtgatagtgtgattgaacccttttttctttaattctgtatgaaagaaaatatctgtaattcagtgatttagtgaatctatgctataaaatttgcttg

SEQ ID NO: 108521 - protein, 501 aa, Arabidopsis thaliana
  peptide (1)..(501): Ceres Seq. ID no. 13667776
  misc_feature (92)..(92): Xaa is any aa, unknown or other
VFLLSRTKRKKGNRLLMSGEKQAEESIVVSGDEEVAGRKVEDSAAEEDIDGNGGNGFSMKSFLWHGGSAWDAWFSCASNQVAQVLLTLPYSXSQLGMLSGILLQIFYGLMGSWTAYLISVLYVEYRARMEKQEAKSFKNHVIQWFEVLDGLLGPYWKAAGLAFNCTFLLFGSVIQLIACASNIYYINDRLDKRTWTYIFGACCATTVFIPSFHNYRIWSFLGLGMTTYTAWYLTIASFLHGQAEGVTHSGPTKLVLYFTGATNILYTFGGHAVTVEIMHAMWKPRKFKSIYLMATLYVFTLTLPSASALYWAFGDQLLNHSNAFSLLPKTRFRDTAVILMLIHQFITFGFACTPLYFVWEKAIGMHHTKSLCLRALVRLPCVPIWFWPIIFPFSAINSAVGALLVTFTVYIIPALAHMLTYRTASAAERAEKPPFFIPSWAGVYVINAFIVVWVLVLGFGFGGWASMTNFIRQIDTFGLFAKCYQCKPPPAPIAAGAHHRR

SEQ ID NO: 108522 - protein, 485 aa, Arabidopsis thaliana
  peptide (1)..(485): Ceres Seq. ID no. 13667777
  misc_feature (76)..(76): Xaa is any aa, unknown or other
MSGEKQAEESIVVSGDEEVAGRKVEDSAAEEDIDGNGGNGFSMKSFLWHGGSAWDAWFSCASNQVAQVLLTLPYSXSQLGMLSGILLQIFYGLMGSWTAYLISVLYVEYRARMEKQEAKSFKNHVIQWFEVLDGLLGPYWKAAGLAFNCTFLLFGSVIQLIACASNIYYINDRLDKRTWTYIFGACCATTVFIPSFHNYRIWSFLGLGMTTYTAWYLTIASFLHGQAEGVTHSGPTKLVLYFTGATNILYTFGGHAVTVEIMHAMWKPRKFKSIYLMATLYVFTLTLPSASALYWAFGDQLLNHSNAFSLLPKTRFRDTAVILMLIHQFITFGFACTPLYFVWEKAIGMHHTKSLCLRALVRLPCVPIWFWPIIFPFSAINSAVGALLVTFTVYIIPALAHMLTYRTASAAERAEKPPFFIPSWAGVYVINAFIVVWVLVLGFGFGGWASMTNFIRQIDTFGLFAKCYQCKPPPAPIAAGAHHRR

SEQ ID NO: 108523 - protein, 443 aa, Arabidopsis thaliana
  peptide (1)..(443): Ceres Seq. ID no. 13667778
  misc_feature (34)..(34): Xaa is any aa, unknown or other
MKSFLWHGGSAWDAWFSCASNQVAQVLLTLPYSXSQLGMLSGILLQIFYGLMGSWTAYLISVLYVEYRARMEKQEAKSFKNHVIQWFEVLDGLLGPYWKAAGLAFNCTFLLFGSVIQLIACASNIYYINDRLDKRTWTYIFGACCATTVFIPSFHNYRIWSFLGLGMTTYTAWYLTIASFLHGQAEGVTHSGPTKLVLYFTGATNILYTFGGHAVTVEIMHAMWKPRKFKSIYLMATLYVFTLTLPSASALYWAFGDQLLNHSNAFSLLPKTRFRDTAVILMLIHQFITFGFACTPLYFVWEKAIGMHHTKSLCLRALVRLPCVPIWFWPIIFPFSAINSAVGALLVTFTVYIIPALAHMLTYRTASAAERAEKPPFFIPSWAGVYVINAFIVVWVLVLGFGFGGWASMTNFIRQIDTFGLFAKCYQCKPPPAPIAAGAHHRR

SEQ ID NO: 108524 - DNA, 1478 bp, Arabidopsis thaliana
  misc_feature (1)..(1478): Ceres Seq. ID no. 13667779
  misc_feature (1)..(1478): Ortholog of  Ceres SEQ ID NO 15176325 as cited in SEQ ID NO 52802
  misc_feature (1)..(1478): Ortholog of  Ceres SEQ ID NO 15176313 as cited in SEQ ID NO 52831
tttgaatacatatccaccacttgtcttgttcttgaaacacacggtcgtggccatgtctgttctgcttccgatgtatcctctccaatccttggccagaagcaagagattgtttccgattcgaaccagatcaaaaccggtttgtttagcactgaccaatgctcaaacaaacggtggtgaccaagaggagaaagtagtgattgttggcgccgggattggcggacttgccactgccgtttcacttcacaggcttggaatccggtcggtggtgttggagcaggcagagtcgcttcgtactggtggaacatcactgacgctattcaagaatgggtggcgcgttcttgacgccatttccgtcgggcctcaactccgaacgcagtttcttgaaatcgaagggatggtagtgaagaaggaagatggaagagagcttcgttctttcaaattcaaagacgatgatcaaagccaagaagttcgggccgtggagaggcgagtactcttggaaacacttgcaagccagcttcctccacaaaccattcggttttcctcaaaactggaaagtatacaaagcaatgccaatggtgacactctccttcaacttggagatggaacccggttgcttgcacagattgttattggttgtgacggtatccggtctaaggttgcaacttggatggggttcagtgagccgaaatatgttggccattgcgcttaccgtggtcttgggttctatccaaatggacagccatttcagaaaaaggtgaactacatatacggtaaagggattagagctggatatgtacctgtatctacaacaaaagtctactggttcatctgtttcaacagcccatctctagggcccaaaattacggatccagcgatcctaaaaaaacaagccaaagaactggttagtacatggccagaagatctgcaaaacctcatcgatttaacacctgatgaaactatcagcagaactcctctagtagaccggtggctatggcctggcattgctcctccagcatcaaaaggacgagtggttcttgttggagatgcttggcacccaatgactccaaatcttggacaaggtgcttgttgtgccttggaagattcagtagttctggcaaataaacttgccaatgcaataaatggaggaaccgaatcaattgaagtagcaatggaatcatacgggagtgagagatggtctcgagcattcccgttgacagtacgtgcaaacctagttggcgcacttctgcaatgggagaatcctctagtgtgttccattagaaacaatattgtcataccaaagttactgaggcttggaccaatgcttgaacacacaaactttgagtgtgaacctctctttgtttctaaaagctgaatttcgtatatatagtgagatccattgaatagagagacttgaacaatgtataatcataggaacaatataaactctgtgattgaatgtaaaagaatcatacaatgta

SEQ ID NO: 108525 - protein, 456 aa, Arabidopsis thaliana
  peptide (1)..(456): Ceres Seq. ID no. 13667780
LNTYPPLVLFLKHTVVAMSVLLPMYPLQSLARSKRLFPIRTRSKPVCLALTNAQTNGGDQEEKVVIVGAGIGGLATAVSLHRLGIRSVVLEQAESLRTGGTSLTLFKNGWRVLDAISVGPQLRTQFLEIEGMVVKKEDGRELRSFKFKDDDQSQEVRAVERRVLLETLASQLPPQTIRFSSKLESIQSNANGDTLLQLGDGTRLLAQIVIGCDGIRSKVATWMGFSEPKYVGHCAYRGLGFYPNGQPFQKKVNYIYGKGIRAGYVPVSTTKVYWFICFNSPSLGPKITDPAILKKQAKELVSTWPEDLQNLIDLTPDETISRTPLVDRWLWPGIAPPASKGRVVLVGDAWHPMTPNLGQGACCALEDSVVLANKLANAINGGTESIEVAMESYGSERWSRAFPLTVRANLVGALLQWENPLVCSIRNNIVIPKLLRLGPMLEHTNFECEPLFVSKS

SEQ ID NO: 108526 - protein, 439 aa, Arabidopsis thaliana
  peptide (1)..(439): Ceres Seq. ID no. 13667781
MSVLLPMYPLQSLARSKRLFPIRTRSKPVCLALTNAQTNGGDQEEKVVIVGAGIGGLATAVSLHRLGIRSVVLEQAESLRTGGTSLTLFKNGWRVLDAISVGPQLRTQFLEIEGMVVKKEDGRELRSFKFKDDDQSQEVRAVERRVLLETLASQLPPQTIRFSSKLESIQSNANGDTLLQLGDGTRLLAQIVIGCDGIRSKVATWMGFSEPKYVGHCAYRGLGFYPNGQPFQKKVNYIYGKGIRAGYVPVSTTKVYWFICFNSPSLGPKITDPAILKKQAKELVSTWPEDLQNLIDLTPDETISRTPLVDRWLWPGIAPPASKGRVVLVGDAWHPMTPNLGQGACCALEDSVVLANKLANAINGGTESIEVAMESYGSERWSRAFPLTVRANLVGALLQWENPLVCSIRNNIVIPKLLRLGPMLEHTNFECEPLFVSKS

SEQ ID NO: 108527 - protein, 433 aa, Arabidopsis thaliana
  peptide (1)..(433): Ceres Seq. ID no. 13667782
MYPLQSLARSKRLFPIRTRSKPVCLALTNAQTNGGDQEEKVVIVGAGIGGLATAVSLHRLGIRSVVLEQAESLRTGGTSLTLFKNGWRVLDAISVGPQLRTQFLEIEGMVVKKEDGRELRSFKFKDDDQSQEVRAVERRVLLETLASQLPPQTIRFSSKLESIQSNANGDTLLQLGDGTRLLAQIVIGCDGIRSKVATWMGFSEPKYVGHCAYRGLGFYPNGQPFQKKVNYIYGKGIRAGYVPVSTTKVYWFICFNSPSLGPKITDPAILKKQAKELVSTWPEDLQNLIDLTPDETISRTPLVDRWLWPGIAPPASKGRVVLVGDAWHPMTPNLGQGACCALEDSVVLANKLANAINGGTESIEVAMESYGSERWSRAFPLTVRANLVGALLQWENPLVCSIRNNIVIPKLLRLGPMLEHTNFECEPLFVSKS

SEQ ID NO: 108528 - DNA, 793 bp, Arabidopsis thaliana
  misc_feature (1)..(793): Ceres Seq. ID no. 13667786
  misc_feature (1)..(793): Ortholog of  Ceres SEQ ID NO 12610267 as cited in SEQ ID NO 51993
  misc_feature (1)..(793): Ortholog of  Ceres SEQ ID NO 13495070 as cited in SEQ ID NO 53216
  misc_feature (1)..(793): Ortholog of  Ceres SEQ ID NO 13661333 as cited in SEQ ID NO 61620
  misc_feature (1)..(793): Ortholog of  Ceres SEQ ID NO 13596812 as cited in SEQ ID NO 62283
  misc_feature (1)..(793): Ortholog of  Ceres SEQ ID NO 13623021 as cited in SEQ ID NO 0
ccacgcgtccgccacgcctaaaaaaaagaaaaaagagacagaagaagaaaaagataaagaagaatcaaactttgtaaccctttagcagcaatggcgatggctttcaagatggcgacgacggggatgcgtgtgacggatgagtgtacgagttcattcatggacatgaaatggaagaaagttcatagatacatcgttttcaagatcgaagagaagtcacgtaaagtcaccgtcgataaagtcggcggcgccggtgaaagctaccacgatctcgaagattctttaccggtggatgattgtcgctacgctgtctttgatttcgactttgtcaccgtcgataactgccgcaagagcaagatcttcttcattgcatggtcaccggaggcatcaaagataagggcaaagatattgtacgcaacgtcgaaagatgggctgaggagagtgttggaagggattcactatgaactccaagctactgatccgacggagatgggtttcgatattatccaagaccgtgccaaatagattgatcacttaagagaatatgatttgactcactttgtcaataattaacattaattaggtcatcggttaatgtttaattattgctggttagtgcttactcttttttgagtttattatccttgatcagtcttaccggcactatcctttaattatgacgtttgtgttttgattgtgttgttaaaatatttttttgtcggttaagcaaacataaaaagctacgaatttgtcctacgagtaacggatattatacatttatgagagattttatttt

SEQ ID NO: 108529 - protein, 143 aa, Arabidopsis thaliana; identical to SEQ ID NO: 36262
  peptide (1)..(143): Ceres Seq. ID no. 13667787

SEQ ID NO: 108530 - protein, 141 aa, Arabidopsis thaliana; identical to SEQ ID NO: 36263
  peptide (1)..(141): Ceres Seq. ID no. 13667788

SEQ ID NO: 108531 - protein, 137 aa, Arabidopsis thaliana; identical to SEQ ID NO: 36264
  peptide (1)..(137): Ceres Seq. ID no. 13667789

SEQ ID NO: 108532 - DNA, 903 bp, Arabidopsis thaliana
  misc_feature (1)..(903): Ceres Seq. ID no. 13667790
  misc_feature (1)..(903): Ortholog of  Ceres SEQ ID NO 13597542 as cited in SEQ ID NO 64986
ccacgcgtccgcgttgaccagaaaaacacacagagaaaggagaaaaacatggaggagttggcgcatccgtacgttccgagagatctgaacctacccggatacgtaccaatctcaatgtcaatgtcctccatcgtctctatctacctcggttcttccctccttgttgtctccctcgtctggcttctcttcgggaggaagaaagctaaacttgataagttgcttatgtgttggtggacattcactggtctcactcatgttattctcgagggctatttcgttttctcccctgagtttttcaaggacaacacttctgcttatcttgctgaagtttggaaagaatatagcaaaggtgattcgagatacgtaggtagagattctgcagttgtatctgttgaagggatcactgctgttatcgttggcccagcttctctcctagcaatttacgccattgctaaggagaagtcgtatagttacgtgcttcagcttgcgatttcggtttgccagctctacggatgtgtggtttatttcattactgctatcttggaaggagacaactttgccacaaactctttctactattactcgtactacatcggggctaactgttggtgggtcttgataccttcactcatttctttccgttgctggaaaaagatttgtgcagctgctgccattgccaacaacaacgtcgagacaaagacgaagaagaaaacccgttgaagcaaggatcaaactctcttttatctcttcaggttactgcctctatagcaaatgaacatgagtctccttttgcggataatttctccaaattaaagactttaggtactgttgtctgtctctcttacagcaataaacttgtgaggataattaatccatttttcatatgatatttgcgcttttgtt

SEQ ID NO: 108533 - protein, 239 aa, Arabidopsis thaliana
  peptide (1)..(239): Ceres Seq. ID no. 13667791
PRVRVDQKNTQRKEKNMEELAHPYVPRDLNLPGYVPISMSMSSIVSIYLGSSLLVVSLVWLLFGRKKAKLDKLLMCWWTFTGLTHVILEGYFVFSPEFFKDNTSAYLAEVWKEYSKGDSRYVGRDSAVVSVEGITAVIVGPASLLAIYAIAKEKSYSYVLQLAISVCQLYGCVVYFITAILEGDNFATNSFYYYSYYIGANCWWVLIPSLISFRCWKKICAAAAIANNNVETKTKKKTR

SEQ ID NO: 108534 - protein, 223 aa, Arabidopsis thaliana
  peptide (1)..(223): Ceres Seq. ID no. 13667792
MEELAHPYVPRDLNLPGYVPISMSMSSIVSIYLGSSLLVVSLVWLLFGRKKAKLDKLLMCWWTFTGLTHVILEGYFVFSPEFFKDNTSAYLAEVWKEYSKGDSRYVGRDSAVVSVEGITAVIVGPASLLAIYAIAKEKSYSYVLQLAISVCQLYGCVVYFITAILEGDNFATNSFYYYSYYIGANCWWVLIPSLISFRCWKKICAAAAIANNNVETKTKKKTR

SEQ ID NO: 108535 - protein, 201 aa, Arabidopsis thaliana
  peptide (1)..(201): Ceres Seq. ID no. 13667793
MSMSSIVSIYLGSSLLVVSLVWLLFGRKKAKLDKLLMCWWTFTGLTHVILEGYFVFSPEFFKDNTSAYLAEVWKEYSKGDSRYVGRDSAVVSVEGITAVIVGPASLLAIYAIAKEKSYSYVLQLAISVCQLYGCVVYFITAILEGDNFATNSFYYYSYYIGANCWWVLIPSLISFRCWKKICAAAAIANNNVETKTKKKTR

SEQ ID NO: 108536 - DNA, 987 bp, Arabidopsis thaliana
  misc_feature (1)..(987): Ceres Seq. ID no. 13667797
  misc_feature (1)..(987): Ortholog of  Ceres SEQ ID NO 13503499 as cited in SEQ ID NO 68684
gtttctttaaggtcttagggtttagtgaagctatagatttcaatttcatacatagttaacgtatagaaggaatcttgggttgatcaatggaaggttgtccaagaaacagagaaatcggtccaaaacttcttgatttgattccacaaggaaggaaatggtaccaagaagacaagaacaacacagatcaggagaagaaacttgagctaaggctgcaccgtggtgatgaagaagatcattcagcaatcaagaagaagaacacagagataagaaacatcaagaaggaaacagaagacaaatctttccactgttttaatggcaatcacttctctccttccaacaaaaccacttctgttcctcacatctcacagaaaagaactgctcctggtccagtggtgggttggcctccggttcgttcgttcagaaagaatctagcgagcacaagctcttcaaagctaggtaacgaatcctctcatggaggtcaaatcaacaagagtgatgatggtgaaaaacaagttgaaaccaagaaggaaggaatgtttgtcaagatcaacatggatggtgttcctattggtcgtaaagttgatctcaatgcttacaacagctacgaacagctctcttttgtcgttgacaaactcttcagaggtctactcgcagctcaaagagatatctctgatggtcaaggagaagagaaacctatcattggattattagatgggaaaggagaatttactttaacctatgaagacaatgaaggggacaagatgcttgttggggatgttccatggcaaatgtttgtttcatctgtgaagagactgcgtgtgattaaaagctctgagatttcatctgccttgacatttggatgcagtaagcaagagaagatgatgcactgaagagtctttttagaaacttttatttcagacagagagtctcaaagctttataaatgtacatctggtttttgttatatataagagttaatcattggttt

SEQ ID NO: 108537 - protein, 267 aa, Arabidopsis thaliana
  peptide (1)..(267): Ceres Seq. ID no. 13667798
MEGCPRNREIGPKLLDLIPQGRKWYQEDKNNTDQEKKLELRLHRGDEEDHSAIKKKNTEIRNIKKETEDKSFHCFNGNHFSPSNKTTSVPHISQKRTAPGPVVGWPPVRSFRKNLASTSSSKLGNESSHGGQINKSDDGEKQVETKKEGMFVKINMDGVPIGRKVDLNAYNSYEQLSFVVDKLFRGLLAAQRDISDGQGEEKPIIGLLDGKGEFTLTYEDNEGDKMLVGDVPWQMFVSSVKRLRVIKSSEISSALTFGCSKQEKMMH

SEQ ID NO: 108538 - DNA, 954 bp, Arabidopsis thaliana
  misc_feature (1)..(954): Ceres Seq. ID no. 13667799
  misc_feature (1)..(954): Ortholog of  Ceres SEQ ID NO 12557432 as cited in SEQ ID NO 92
  misc_feature (1)..(954): Ortholog of  Ceres SEQ ID NO 14305097 as cited in SEQ ID NO 0
tgacaacatggagtcccacaggtcgactattccaagtcgaatacgccatggaagctgtgaaacaaggctccgcagcaataggactcagatctcgctctcatgtcgtcctcgcttgtgtcaacaaagcacaatcagagctctcttctcatcaaaggaagatctttaaagtcgatgatcatattggtgttgctattgctggtctcactgctgatggtcgtgttctctctcgatatatgagatctgagtctattaatcactcttttacttatgagtctcctcttcctgttggtcgtcttgttgttcatcttgctgataaagctcaggtatgtacccaacgatcatggaaacggccttatggtgtgggtttgctggtaggtggattggacgagtcaggagctcacctctactacaactgccctagcggaaactactttgaatatcaagcattcgctatcgggtctcgttcacaagctgcgaaaacctatctggagcgcaaattcgagagcttccaagaatcatcaaaagaagatctgataaaagatgctattatggccataagggaaactttgcaaggggaaacactgaagagctcgctctgcactgtttctgttctaggagtcgatgaaccattccatttcttggaccaggaaagcattcaaaaggtgattgatacgtttgagaaggttcctgaggaagaggaagatgctggtgagggtgaggccgaacccgaagctgctcctggtgctgctggaactggtgaacaaggtggttcaggtgatcaagatgttgcaccaatggaaatttgagcaagagggaatgagttcaaagttggattttctaaccaattttcttgtgtgtagctctttgatatgttccaacttccaagtacaattgtggtttttattcggctttgtttatttaacagcttggaacaaggagttattctaaattact

SEQ ID NO: 108539 - protein, 267 aa, Arabidopsis thaliana
  peptide (1)..(267): Ceres Seq. ID no. 13667800
TTWSPTGRLFQVEYAMEAVKQGSAAIGLRSRSHVVLACVNKAQSELSSHQRKIFKVDDHIGVAIAGLTADGRVLSRYMRSESINHSFTYESPLPVGRLVVHLADKAQVCTQRSWKRPYGVGLLVGGLDESGAHLYYNCPSGNYFEYQAFAIGSRSQAAKTYLERKFESFQESSKEDLIKDAIMAIRETLQGETLKSSLCTVSVLGVDEPFHFLDQESIQKVIDTFEKVPEEEEDAGEGEAEPEAAPGAAGTGEQGGSGDQDVAPMEI

SEQ ID NO: 108540 - protein, 252 aa, Arabidopsis thaliana; identical to SEQ ID NO: 35616
  peptide (1)..(252): Ceres Seq. ID no. 13667801

SEQ ID NO: 108541 - protein, 190 aa, Arabidopsis thaliana
  peptide (1)..(190): Ceres Seq. ID no. 13667802
MRSESINHSFTYESPLPVGRLVVHLADKAQVCTQRSWKRPYGVGLLVGGLDESGAHLYYNCPSGNYFEYQAFAIGSRSQAAKTYLERKFESFQESSKEDLIKDAIMAIRETLQGETLKSSLCTVSVLGVDEPFHFLDQESIQKVIDTFEKVPEEEEDAGEGEAEPEAAPGAAGTGEQGGSGDQDVAPMEI

SEQ ID NO: 108542 - DNA, 1304 bp, Arabidopsis thaliana
  misc_feature (1)..(1304): Ceres Seq. ID no. 13667803
  misc_feature (1)..(1304): Ortholog of  Ceres SEQ ID NO 15179926 as cited in SEQ ID NO 57010
  misc_feature (1)..(1304): Ortholog of  Ceres SEQ ID NO 14316075 as cited in SEQ ID NO 60059
ctacgtcagggattcattccgatctgaaatctctctctagatttctctatttttcgaattttaaatgaacgatttgttttccagctcattctctcgcttccgcagcggagaaccatcccctcgccgagacgttgccggcggtggcgacggagttcagatggcgaatcccgcgggatcaaccggtggtgtgaacctcgacaagttcttcgaagatgttgaatctgtgaaagaagagctaaaggagctagatcggctcaacgaaacactctcttcatgtcacgagcagagcaagacgcttcacaatgctaaagccgttaaagatctccggtctaaaatggacggtgacgttggagtcgcgttgaagaaggcgaagatgattaaagttaaactcgaggcgctagatcgtgccaatgctgctaatcggagtctccctggctgtggacctggttcttcctccgatcgaaccaggacctctgtcctcaatggtctcaggaagaaattgatggactctatggatagtttcaaccgattgagggagcttatctcgtccgagtatagagaaactgtacagaggaggtacttcaccgtcaccggcgagaatccggatgaacgaaccctagatcgactgatttccactggagagagtgagagattcttgcagaaagcaatacaagaacaaggaagaggaagggtgttagacaccattaacgagattcaagaaaggcatgatgcggttaaagacattgagaagaatctcagggagcttcaccaggtgtttctagacatggccgtgctggtagagcaccagggagctcagcttgatgacatcgagagtcatgtgggtcgagctagctcctttatcagaggcggaactgaccagctacaaaccgctcgggtttaccagaagaacacgcgaaaatggacatgtattgccattattattctcatcatcatcataactgttgtggttcttgctgttttaaaaccgtggaacaacagcagtggcggcggcggcggtggtggtggtgggggtaccactggaggaagtcaaccaaattcagggacaccaccaaatcctcctcaggcaaggcgtctattgcgttgaagttgaagttgaagttgagtttcgttatttgcatatatattctttctttgaaaaaccttattatcaaaccagctttgtgttactactttctactgctggtttgttgttaatctcccgtttatttggtttttgtgaaagaatttaaaatgtgggttagatgagaaaattagtacaacattctcttgtatctatgtttgct

SEQ ID NO: 108543 - protein, 346 aa, Arabidopsis thaliana; identical to SEQ ID NO: 24734
  peptide (1)..(346): Ceres Seq. ID no. 13667804

SEQ ID NO: 108544 - protein, 315 aa, Arabidopsis thaliana; identical to SEQ ID NO: 24735
  peptide (1)..(315): Ceres Seq. ID no. 13667805

SEQ ID NO: 108545 - protein, 256 aa, Arabidopsis thaliana; identical to SEQ ID NO: 24736
  peptide (1)..(256): Ceres Seq. ID no. 13667806

SEQ ID NO: 108546 - DNA, 1952 bp, Arabidopsis thaliana
  misc_feature (1)..(1952): Ceres Seq. ID no. 13667807
  misc_feature (1)..(1952): Ortholog of  Ceres SEQ ID NO 13584744 as cited in SEQ ID NO 69137
tcgagagcgaaggaagagagagagagagggagagatcaaaaaaatttgtgaaaaaagagatttattttagggttttgttgattttctttgttcattttgccgtcgtctctttctctttctcttgtgaagaaaaagaagaaaaatgaaacttctgggtttggtcttcttgctgtttaatctgtttatgttttcgttttctcggaaacttttaaccgagagtggtggtggtctccacgacgaagctgctctgttgaagttgaagagtagtttcttggatccaaatggagttctgtctagctgggtttccgacagctcatcaaaccattgttcttggtacggtgtctcttgcaactctgattcgagagtcgtttctttaattctcagaggctgtgatgagcttgaaggtagtggtgttcttcatctcccagatttgtcttcttgttcttcaagtaaaagaagacttggtggtgtaatctctcctgttgttggagatttgtctgaaattagggttttatctctgtcttttaatgatcttagaggtgagattccaaaggagatttgggggttggagaaattagagattcttgatcttaaaggtaacaactttatcggtggaattagggttgttgataatgttgttcttaggaaacttatgagttttgaggatgaagatgaaattggtccaagctcagctgatgatgattctcctggtaaatctggattgtatccgattgagatagcttctattgtgtcagcttcagtgattgtctttgtgcttcttgttcttgtgatcttgttcatctacacgaggaaatggaaacgaaactctcaggttcaggtagatgagatcaaggagattaaagtgtttgttgacattggtattcctctgacgtatgagatcattgttagagctactggttactttagtaactctaactgtatcggtcacggcggtttcggttcgacttataaagcagaggtgtctccaacgaatgtgtttgctgttaaaagactctctgttgggaggtttcaaggtgatcaacagtttcatgctgagatctctgctcttgagatggttaggcatccgaatcttgttatgttaatcggttaccatgcgagcgaaaccgagatgtttcttatttacaactacttatctggaggaaaccttcaagatttcattaaagagagatcgaaagctgctattgagtggaaggtacttcacaagattgctcttgatgtagcgcgtgctctctcctatcttcacgaacagtgttctcctaaagtcttgcatagagatatcaaaccgagtaacatactcttggacaacaactacaacgcttatctatctgatttcggactctcgaaactcttgggaacttcgcagtctcatgtcacaactggtgtggctggaacattcggatatgtagctccagagtacgcaatgacatgccgagtctcggagaaagcagatgtttacagctatgggatagtcctcttggagctgatatcggacaaacgagctctggatccttctttctcatcgcatgagaacgggttcaacattgtctcgtgggctcatatgatgttgagtcaaggcaaagcgaaagaagtcttcaccacaggactatgggagactggtcctccagacgatttggtcgaggttctacatttggcactcaaatgcaccgtcgatagcctctcgataaggccgacaatgaaacaagctgtaagactgctgaaacgaatccagccttctagattgtgatacaaagctagaagaaaggtgtttttagaggatttgtacagcagcaaacaagtgcctagccattagaatctttctcaagtctgttttttatattttcagtgctagggaggtttttcatatgcatcatcaaaatgttattctcagtctactctcttgaaaactgatataaatgatgctctgcggccgc

SEQ ID NO: 108547 - protein, 540 aa, Arabidopsis thaliana; identical to SEQ ID NO: 36330
  peptide (1)..(540): Ceres Seq. ID no. 13667808

SEQ ID NO: 108548 - protein, 526 aa, Arabidopsis thaliana; identical to SEQ ID NO: 36331
  peptide (1)..(526): Ceres Seq. ID no. 13667809

SEQ ID NO: 108549 - protein, 370 aa, Arabidopsis thaliana; identical to SEQ ID NO: 36332
  peptide (1)..(370): Ceres Seq. ID no. 13667810

SEQ ID NO: 108550 - DNA, 1005 bp, Arabidopsis thaliana
  misc_feature (1)..(1005): Ceres Seq. ID no. 13667815
  misc_feature (1)..(1005): Ortholog of  Ceres SEQ ID NO 14307589 as cited in SEQ ID NO 20466
  misc_feature (1)..(1005): Ortholog of  Ceres SEQ ID NO 12611159 as cited in SEQ ID NO 59821
  misc_feature (1)..(1005): Ortholog of  Ceres SEQ ID NO 13584238 as cited in SEQ ID NO 64216
  misc_feature (1)..(1005): Ortholog of  Ceres SEQ ID NO 13661001 as cited in SEQ ID NO 67531
acccacgcgtccggagaagtaaaattttctattgcagagagaaagagagttagagaaagagagagagagatgaaacttgtgcaagaagaataccgtaaaggaccgtggacagaacaggaggacatcctcttggtcaactttgtccacttgttcggagatcgaagatgggattttgtagcgaaagtttcaggtttaaacagaacaggaaagagttgcaggttaaggtgggttaattacctgcatcctggtctcaaacgtggtaagatgactccacaagaagagcgtttagtccttgagcttcacgccaaatggggaaacaggtggtcaaaaattgcccggaaattaccggggagaacagataatgagataaagaactactggaggactcatatgaggaagaaggctcaagagaagaagcgacctatgtctcctacttcctcatcttcaaactgttgctcatcatctatgaccactactactagtcaagacactggaggctccaacgggaaaatgaatcaagaatgcgaagacgggtactactccatggatgacatatggagagagattgatcagtctggagcaaacgttattaaaccggtaaaagacaactactactcagagcaaagctgttacttgaatttccctcctctggcttctccaacatgggaaagttccttggaatctatatggaacatggatgcagatgaaagtaagatgtcttcttttgctattgatcagtttcctctaagttttgaacatggtagtggtcgcctttagtctaggatttgattcatttggaatgtttatatgtgcagcatatatatgttatcaaacgacgactgtagtagtttcctatgacttacatcaaaaaacaccacccactgtactaatctcataagtagtcatcatcctatgcctttgtttagtttgtagagtgagtgaaaagatgtgtaatacaagtcagaactctaattccaaaataaatagacttttgaagcttctgtg

SEQ ID NO: 108551 - protein, 258 aa, Arabidopsis thaliana
  peptide (1)..(258): Ceres Seq. ID no. 13667816
THASGEVKFSIAERKRVREREREMKLVQEEYRKGPWTEQEDILLVNFVHLFGDRRWDFVAKVSGLNRTGKSCRLRWVNYLHPGLKRGKMTPQEERLVLELHAKWGNRWSKIARKLPGRTDNEIKNYWRTHMRKKAQEKKRPMSPTSSSSNCCSSSMTTTTSQDTGGSNGKMNQECEDGYYSMDDIWREIDQSGANVIKPVKDNYYSEQSCYLNFPPLASPTWESSLESIWNMDADESKMSSFAIDQFPLSFEHGSGRL

SEQ ID NO: 108552 - protein, 235 aa, Arabidopsis thaliana; identical to SEQ ID NO: 106919
  peptide (1)..(235): Ceres Seq. ID no. 13667817

SEQ ID NO: 108553 - protein, 170 aa, Arabidopsis thaliana; identical to SEQ ID NO: 106920
  peptide (1)..(170): Ceres Seq. ID no. 13667818

SEQ ID NO: 108554 - DNA, 1392 bp, Arabidopsis thaliana
  misc_feature (1)..(1392): Ceres Seq. ID no. 13667821
  misc_feature (1)..(1392): Ortholog of  Ceres SEQ ID NO 12599421 as cited in SEQ ID NO 65135
ggaattcggcacgagcggcacgagcggcacgagagagcgatagtgagatttagatcaacagatttgaatcgatttctgaaaacatgcagtacaagaatctggggaaatcgggtttaaaagtgagcacgctctcgttcggagcgtgggttacgttcgggaaccagctcgatgtgaaagaagcgaaatcgattcttcagtgttgtcgtgatcatggagtcaatttcttcgataacgctgaggtttacgctaatggtcgcgctgaggagattatgggtcaagcgattcgtgaactgggttggcgtcgatccgatatcgtcatctctaccaagatcttctggggtggtcctggtcctaacgataagggtttatctaggaaacatatcgttgaaggcactaaagcttctctcaaacgacttgatatggattacgttgatgtgctctattgccacaggccggatgcttcaactcctatcgaagagactgtgagggcgatgaactacgtgattgataagggttgggccttctattggggaaccagtgaatggtcagctcaacaaattacggaggcatggggagctgctgaccggttggatttggttggtccaattgtcgaacagccagaatacaacatgttcgctaggcacaaagttgagacagagtttcttcctctgtacaccaaccatggtataggtctcactacctggagcccacttgcatctggtgtgctcactggtaaatacaacaagggagctattccctcagacagccgatttgcattggagaactacaaaaaccttgccaatagatcacttgtggatgacgtgctgaggaaagttagcggtctcaaacccattgcagatgagctaggtgtaactttggctcagcttgcaatcgcatggtgtgcttcaaatcctaatgtgtcatctgttatcactggtgccacaagggagtcacagattcaagaaaatatgaaagctgttgatgtgatcccattgttgacccctattgttctggacaagattgagcaagtgatacagagcaaaccaaaacgtcctgaatcatataggtaaaaccaacatccaagatctctcttccctattcaatcgtttacaaaagagtgttgcaggaaaaagaaaacattagaagaagctctgtgatgtatgttgttggatgttgtctcgttttcgctttgtttgttctctttagcagcttatgcatttttaagactcagacaaagagaaagagagactaatgttttttttttagtttttcttgtttcatcatttaaaaaacggtcttatttgttacttgttagtgcagcttaaagtttggttcttgtagtttgccatgtcatgacgtcaatatattgaatagctataaacaattctggtt

SEQ ID NO: 108555 - protein, 328 aa, Arabidopsis thaliana; identical to SEQ ID NO: 35459
  peptide (1)..(328): Ceres Seq. ID no. 13667822

SEQ ID NO: 108556 - protein, 266 aa, Arabidopsis thaliana; identical to SEQ ID NO: 35460
  peptide (1)..(266): Ceres Seq. ID no. 13667823

SEQ ID NO: 108557 - protein, 216 aa, Arabidopsis thaliana; identical to SEQ ID NO: 35461
  peptide (1)..(216): Ceres Seq. ID no. 13667824

SEQ ID NO: 108558 - DNA, 1122 bp, Arabidopsis thaliana
  misc_feature (1)..(1122): Ceres Seq. ID no. 13667833
  misc_feature (1)..(1122): Ortholog of  Ceres SEQ ID NO 15175048 as cited in SEQ ID NO 59975
  misc_feature (1)..(1122): Ortholog of  Ceres SEQ ID NO 13597333 as cited in SEQ ID NO 63974
  misc_feature (1)..(1122): Ortholog of  Ceres SEQ ID NO 13599307 as cited in SEQ ID NO 0
  misc_feature (1)..(1122): Ortholog of  Ceres SEQ ID NO 15179517 as cited in SEQ ID NO 0
aattcggcacgaggtttgcgtctcgcttcatcttcaacctcaaacccaatttgtctactaaaccctggaaaaaaccttaatttcccaatccgaaaccatagaatccctaaaacttcgaaacccttttgcgttaggtcttcaatgagcttgtctaaaccacccagacaaaccttatctagtaactgggatgtatctagcttctccattgattccgttgctcaatctccttcaagactcccaagtttcgaagaactcgataccaccaacatgttgctccgtcaaagaatcgtctttttgggttctcaggttgatgatatgacggcggatttggttataagtcagctattgttactagatgctgaggactcagaaagagacattacgctttttatcaattcacccggtggatctattactgctgggatgggaatatatgatgcaatgaaacaatgtaaggcggatgtatctactgtttgcttagggttagctgcatctatgggtgcgtttcttcttgcttctggttcaaaagggaaacggtattgtatgcctaactctaaagttatgatccatcagccacttggtactgctggaggcaaagcaacggaaatgagcatacgtataagagaaatgatgtaccacaagattaaacttaacaaaatcttctctagaatcactgggaagcctgaatcagagatcgaaagtgacacagaccgtgataacttcttgaatccatgggaggcgaaagaatatggtttgatcgacgctgtaatcgatgatgggaaaccgggactaatcgctccaattggagatggtactcctcctcctaaaaccaaagtctgggatctttggaaagtcgaaggaaccaagaaagacaacactaacttgccatctgagcgctccatgacacagaatggttatgccgccattgaatagaactgttgttgcagcgtttacgccttttatatgttattctggtggtacctgtaaccatataacgttgcatttcctgtgtttgtaccatttctctgatagatttttggaataatttgaaggcaaaagatagattatttgttgtagaagaagctacaaaatttaatgattaaattgaatcatcaagccatg

SEQ ID NO: 108559 - protein, 310 aa, Arabidopsis thaliana
  peptide (1)..(310): Ceres Seq. ID no. 13667834
NSARGLRLASSSTSNPICLLNPGKNLNFPIRNHRIPKTSKPFCVRSSMSLSKPPRQTLSSNWDVSSFSIDSVAQSPSRLPSFEELDTTNMLLRQRIVFLGSQVDDMTADLVISQLLLLDAEDSERDITLFINSPGGSITAGMGIYDAMKQCKADVSTVCLGLAASMGAFLLASGSKGKRYCMPNSKVMIHQPLGTAGGKATEMSIRIREMMYHKIKLNKIFSRITGKPESEIESDTDRDNFLNPWEAKEYGLIDAVIDDGKPGLIAPIGDGTPPPKTKVWDLWKVEGTKKDNTNLPSERSMTQNGYAAIE

SEQ ID NO: 108560 - protein, 263 aa, Arabidopsis thaliana
  peptide (1)..(263): Ceres Seq. ID no. 13667835
MSLSKPPRQTLSSNWDVSSFSIDSVAQSPSRLPSFEELDTTNMLLRQRIVFLGSQVDDMTADLVISQLLLLDAEDSERDITLFINSPGGSITAGMGIYDAMKQCKADVSTVCLGLAASMGAFLLASGSKGKRYCMPNSKVMIHQPLGTAGGKATEMSIRIREMMYHKIKLNKIFSRITGKPESEIESDTDRDNFLNPWEAKEYGLIDAVIDDGKPGLIAPIGDGTPPPKTKVWDLWKVEGTKKDNTNLPSERSMTQNGYAAIE

SEQ ID NO: 108561 - protein, 221 aa, Arabidopsis thaliana
  peptide (1)..(221): Ceres Seq. ID no. 13667836
MLLRQRIVFLGSQVDDMTADLVISQLLLLDAEDSERDITLFINSPGGSITAGMGIYDAMKQCKADVSTVCLGLAASMGAFLLASGSKGKRYCMPNSKVMIHQPLGTAGGKATEMSIRIREMMYHKIKLNKIFSRITGKPESEIESDTDRDNFLNPWEAKEYGLIDAVIDDGKPGLIAPIGDGTPPPKTKVWDLWKVEGTKKDNTNLPSERSMTQNGYAAIE

SEQ ID NO: 108562 - DNA, 1298 bp, Arabidopsis thaliana
  misc_feature (1)..(1298): Ceres Seq. ID no. 13667837
  misc_feature (1)..(1298): Ortholog of  Ceres SEQ ID NO 15178181 as cited in SEQ ID NO 58740
  misc_feature (1)..(1298): Ortholog of  Ceres SEQ ID NO 12614739 as cited in SEQ ID NO 68587
gaattcggcacgagtcgagacctagaaattcatcgaaccgtctcgtttctgtattcggacgcaagtcttcttctccttcatttgttactctcagagttgtttcatcgatggcttacgagaaagagcttgatgctgctaagaaagctgcttcactcgctgctcgtctctgtcagaaagttcaaaaggctttgttgcaatcagatgtgcaatcaaaatctgataaaagtccagtgaccgttgctgattatggttcacaagcagttgttagtttagtcttagaaaaagagctcagttctgaacccttttcattggtggctgaagaggactcaggcgatctacgcaaggatggttctcaggatactctggagcgcatcacaaaactcgtgaacgacactttggctaccgaggaatcgtttaatggctctactttgtctactgatgatctacttagagccattgactgtggaacatctgaaggtggtccaaatggtcgacactgggtcttggatccaattgatggcactaaaggatttctgaggggagatcaatacgcagtagcactaggattgctcgaggaagggaaagtagttttaggtgtgcttgcttgtccaaacttgccgttagcatccatagcaggaaacaacaagaacaaatcttcgtcagacgaaattggatgcctcttctttgctacaattggttcagggacatatatgcagctcctagattcaaaatcttctcctgtaaaagtgcaagtctctagtgttgagaatcctgaagaggcatcgttcttcgagtcattcgaaggagctcactctctacatgacttatccagctccattgccaataaactcggtgtcaaagctccaccagtccgtattgatagccaagcaaagtatggagctttatcaagaggagatggagctatatacttacggtttcctcataaaggataccgcgaaaagatttgggaccatgtcgctggtgctatagttgttacagaggcgggtggaatagtgacagatgcagcaggaaagccactggatttctcgaaagggaagtatcttgatttggacacaggcattatcgttgctaacgagaagctaatgcctctgcttttgaaagcagttcgtgactccatagctgagcaagagaaagcttcagctctttgatttgtttttttctctcgtacgttctttgtttctctgtaactgttgtttcattttctttcaccgaatttcaccagtgagaatttcttccattttcgaaaaagaaataaaaatgaaattctgttttgggct

SEQ ID NO: 108563 - protein, 388 aa, Arabidopsis thaliana
  peptide (1)..(388): Ceres Seq. ID no. 13667838
IRHESRPRNSSNRLVSVFGRKSSSPSFVTLRVVSSMAYEKELDAAKKAASLAARLCQKVQKALLQSDVQSKSDKSPVTVADYGSQAVVSLVLEKELSSEPFSLVAEEDSGDLRKDGSQDTLERITKLVNDTLATEESFNGSTLSTDDLLRAIDCGTSEGGPNGRHWVLDPIDGTKGFLRGDQYAVALGLLEEGKVVLGVLACPNLPLASIAGNNKNKSSSDEIGCLFFATIGSGTYMQLLDSKSSPVKVQVSSVENPEEASFFESFEGAHSLHDLSSSIANKLGVKAPPVRIDSQAKYGALSRGDGAIYLRFPHKGYREKIWDHVAGAIVVTEAGGIVTDAAGKPLDFSKGKYLDLDTGIIVANEKLMPLLLKAVRDSIAEQEKASAL

SEQ ID NO: 108564 - protein, 353 aa, Arabidopsis thaliana; identical to SEQ ID NO: 78395
  peptide (1)..(353): Ceres Seq. ID no. 13667839

SEQ ID NO: 108565 - DNA, 1346 bp, Arabidopsis thaliana
  misc_feature (1)..(1346): Ceres Seq. ID no. 13667842
  misc_feature (1)..(1346): Ortholog of  Ceres SEQ ID NO 15225046 as cited in SEQ ID NO 57061
  misc_feature (1)..(1346): Ortholog of  Ceres SEQ ID NO 15173586 as cited in SEQ ID NO 61901
  misc_feature (1)..(1346): Ortholog of  Ceres SEQ ID NO 15179881 as cited in SEQ ID NO 66861
tgaaaaatacaaacccccttttatttctcctcttctctcctacaagctcattcagaactctcaacatttccggtagagaaaaaaaaaccgttttttttttaatctctttctaaagaaggatatcaaaacaaaacacaaagttgaaaactttgcatctgggtttgtctattttagattcagatcttagtttttttcgattgaatatctacaatggtaatggaaacagagtcaaagttccatgttttagctgttgatgatagtctttttgatcggaaaatgattgagagattgcttcaaaagtcttcatgtcaagtaactacagttgattcaggctctaaagctctggaatttctgggtttaagagtagatgacaacgacccaaatgcactctctacatcgccacaaattcatcaggaagttgaaataaatctaataattacagattactgtatgcctggcatgactggttatgatttgctcaagaaagttaaggaatcagcggcgtttagaagtatacctgtagttataatgtcatctgagaacgttcctgcaagaatctccagatgtttggaagaaggagctgaagagtttttcttgaaaccagtgaagttagctgatcttaccaagttgaaacctcatatgatgaaaacgaagttgaagaaagaaagtgagaaaccagttgccatagaagagattgtggtgtctaaaccggagatagaagaagaagaagaagagtcatcagtgattgaaatcttgcctctccaccaagaaattgaatccgaacaacttgaaccaatgttgagtagtaataagagaaaagcaatggaagaagtggtttctactgatcgatcacgtcctaaatacaatgatatcacaacctcggtctgaaggaggactaacgcaacccgagaagccactacaagacctatatggagaatgccaacagaatctctcagtagaagatctgctaactcttgaatatgaagcaaacaacaacggactgctaggagtaataccgcagcaacatcgttatcatcaggaaaaagagacaatgcagacacaaggagatccactaaatcgaatacctattcaatcagaagcttcaaaccattcagatagtggtgatagcacactaacaatggctcaaaaccaggatggtctcggacacagtagttgttttattctctgtcaatttacttctctcccctagattagctttcttcgtttttttcttttatttttcatgctgttaaacccacaagatttttgggaagtttcttgctactagcttaagaatccaaaactattgcaaagattgaagctttcgagaattagtaatgaatctt

SEQ ID NO: 108566 - protein, 225 aa, Arabidopsis thaliana
  peptide (1)..(225): Ceres Seq. ID no. 13667843
MVMETESKFHVLAVDDSLFDRKMIERLLQKSSCQVTTVDSGSKALEFLGLRVDDNDPNALSTSPQIHQEVEINLIITDYCMPGMTGYDLLKKVKESAAFRSIPVVIMSSENVPARISRCLEEGAEEFFLKPVKLADLTKLKPHMMKTKLKKESEKPVAIEEIVVSKPEIEEEEEESSVIEILPLHQEIESEQLEPMLSSNKRKAMEEVVSTDRSRPKYNDITTSV

SEQ ID NO: 108567 - protein, 223 aa, Arabidopsis thaliana
  peptide (1)..(223): Ceres Seq. ID no. 13667844
METESKFHVLAVDDSLFDRKMIERLLQKSSCQVTTVDSGSKALEFLGLRVDDNDPNALSTSPQIHQEVEINLIITDYCMPGMTGYDLLKKVKESAAFRSIPVVIMSSENVPARISRCLEEGAEEFFLKPVKLADLTKLKPHMMKTKLKKESEKPVAIEEIVVSKPEIEEEEEESSVIEILPLHQEIESEQLEPMLSSNKRKAMEEVVSTDRSRPKYNDITTSV

SEQ ID NO: 108568 - protein, 203 aa, Arabidopsis thaliana
  peptide (1)..(203): Ceres Seq. ID no. 13667845
MIERLLQKSSCQVTTVDSGSKALEFLGLRVDDNDPNALSTSPQIHQEVEINLIITDYCMPGMTGYDLLKKVKESAAFRSIPVVIMSSENVPARISRCLEEGAEEFFLKPVKLADLTKLKPHMMKTKLKKESEKPVAIEEIVVSKPEIEEEEEESSVIEILPLHQEIESEQLEPMLSSNKRKAMEEVVSTDRSRPKYNDITTSV

SEQ ID NO: 108569 - DNA, 1183 bp, Arabidopsis thaliana
  misc_feature (1)..(1183): Ceres Seq. ID no. 13667846
  misc_feature (1)..(1183): Ortholog of  Ceres SEQ ID NO 15177055 as cited in SEQ ID NO 57450
  misc_feature (1)..(1183): Ortholog of  Ceres SEQ ID NO 12615854 as cited in SEQ ID NO 62880
ctacgtcagggccacgatccacgccttgaccttcgtttttttttttctcagagattagagaaaactccgataaccaatttctcaatctttttgtagatccaatttttccaggaaaaaaagaggtttcgcgaagaagatgagttttcaagatttagaatcaggaagaggaagatcaacgaggaaattcaatggtggtcgacaagattcgacacaagccgttgcttctggaatattccagatcaataccggagtctccacgtttcagcgactcgttaacacacttggtactcccaaagatacaccggagctccgggagaagctgcacaagacaaggttgcatattggacagcttgtgaaggatacttcagctaaacttaaagaagctagtgaaactgatcatcaaagcggtgtcaatccaagtaagaagattgcagatgctaagcttgcaagggactttcaagctgttttaaaagagtttcagaaagctcaacaaactgctgctgaaagagaaaccacttatactcctttcgtgcctcaatctgctcttccctctagctatacggcgggtgaggtggataaggtaccggaacagcgggcacaacttcaggagtcgaaaagacaagaacttgtattgttagacaacgagattgcattcaacgaggctgtgattgaagaaagagagcaaggaatacaagaaatccatcagcaaattggtgaggttaacgagatattcaaagatcttgcggttctggttaacgatcaaggagtcatgatagatgatattggtactcacattgacaactcccgtgctgcaacttcacaaggaaaatctcagcttgtgcaagccgcgaaaacacaaaaatcaaactcctctctgacatgcttgctcttggtgatatttggcattgttctcctgatcgtgattatagtactcgcagcttgatttcgaacagcaagaacatttcgtttgtgtgtgttcattgatcttaaggcatcaatgactggaactacttggtatatattatatgttgaagagaacacttagaagttggttttgtgtttgtttgggttggttcagttcggtttgaggttctattggttaatgtaatagtgtgtgcgtgtgtggcttttttgttgtgcaaacattttgttggagatgacagaaactctgttttgtttgtgg

SEQ ID NO: 108570 - protein, 268 aa, Arabidopsis thaliana; identical to SEQ ID NO: 29132
  peptide (1)..(268): Ceres Seq. ID no. 13667847

SEQ ID NO: 108571 - DNA, 1438 bp, Arabidopsis thaliana
  misc_feature (1)..(1438): Ceres Seq. ID no. 13667848
  misc_feature (1)..(1438): Ortholog of  Ceres SEQ ID NO 14313264 as cited in SEQ ID NO 67300
  misc_feature (1)..(1438): Ortholog of  Ceres SEQ ID NO 14302824 as cited in SEQ ID NO 67794
ccacgcttccgactcttcttcatcttcttcctctgacgatcattttcagaagactctgattccgatcaaaattgcagaagaagatgtctcgccaatcgtcttctctactgaagaatcttcgtagcatcgcttcccgttccaaaatccagacccgatccgtgacttacatgcccagacccggtgacggaaaaccaagaccagtgacgttaatccccggagacggagttggtccgttggtaacaaacgcggttcaacaagtgatggaagcgatgcacgctccggtttacttcgaaccgttcgaagttcatggagatatgaagagtttacctgaaggattgttggaatcgattaagaagaacaaagtttgtttgaaaggtggtcttaagactcccgtcggtggtggtgtgagctctctcaatgttaatctgagaaaggagcttgatctctttgcttctctcgtcaactgtttcaatttgcctggtttagcttctcgtcatgagaatgttgatattgttgtgattagagagaacactgaaggtgaatatgcaggtcttgaacatgaagttgttcctggtgttgttgagagccttaaggtgattacaaagttctgttcagagcgtatcgcaaagtatgcgtttgagtatgcctacttgaacaacaggaagaaagttacagcagtgcacaaggctaatatcatgaaattggctgatggtttgttcttggagtcttgtcaagaggttgctaagaagtatccaagcattgcttacaatgaaatcattgttgataattgttgtatgcaacttgtggctagaccagagcaattcgatgtcatggtgacgcctaatctctatggtaatctagtggcaaacactgctgctggtattgctggaggctctggagtcatgcctggaggaaatgttggggcggagtatgcggtctttgagcaaggtgcatcagcgggaaacgtggggaaggatacaacggaagagcaaaagaacgcaaaccctgtggctttgttgctgtcatcagccatgatgcttagacaccttcagttcccttcttttgctgacaggcttgaaaccgctgtgaagcgtgttatcgctgaagggaattgtcggactgaagatcttggtggaaacagtaccactcaagaggtcgttgacgctgtcattgcaaatttggattgactttgacaattccaacttcggcttgtgtaaagccatcagtcacacgtcggtatgattcacgcttactgggaaatacttctagttcccacattctttcgagataactcgaattgggatttcagatttcgagaaaaataacatatggttttttgttttgtttttcttctttttgttcatgtaatatgcaaagtgcaaagtgaaaactgcctcagagcattattttttgaataatgaaaattatgtttaacttc

SEQ ID NO: 108572 - protein, 367 aa, Arabidopsis thaliana
  peptide (1)..(367): Ceres Seq. ID no. 13667849
MSRQSSSLLKNLRSIASRSKIQTRSVTYMPRPGDGKPRPVTLIPGDGVGPLVTNAVQQVMEAMHAPVYFEPFEVHGDMKSLPEGLLESIKKNKVCLKGGLKTPVGGGVSSLNVNLRKELDLFASLVNCFNLPGLASRHENVDIVVIRENTEGEYAGLEHEVVPGVVESLKVITKFCSERIAKYAFEYAYLNNRKKVTAVHKANIMKLADGLFLESCQEVAKKYPSIAYNEIIVDNCCMQLVARPEQFDVMVTPNLYGNLVANTAAGIAGGSGVMPGGNVGAEYAVFEQGASAGNVGKDTTEEQKNANPVALLLSSAMMLRHLQFPSFADRLETAVKRVIAEGNCRTEDLGGNSTTQEVVDAVIANLD

SEQ ID NO: 108573 - protein, 339 aa, Arabidopsis thaliana
  peptide (1)..(339): Ceres Seq. ID no. 13667850
MPRPGDGKPRPVTLIPGDGVGPLVTNAVQQVMEAMHAPVYFEPFEVHGDMKSLPEGLLESIKKNKVCLKGGLKTPVGGGVSSLNVNLRKELDLFASLVNCFNLPGLASRHENVDIVVIRENTEGEYAGLEHEVVPGVVESLKVITKFCSERIAKYAFEYAYLNNRKKVTAVHKANIMKLADGLFLESCQEVAKKYPSIAYNEIIVDNCCMQLVARPEQFDVMVTPNLYGNLVANTAAGIAGGSGVMPGGNVGAEYAVFEQGASAGNVGKDTTEEQKNANPVALLLSSAMMLRHLQFPSFADRLETAVKRVIAEGNCRTEDLGGNSTTQEVVDAVIANLD

SEQ ID NO: 108574 - protein, 308 aa, Arabidopsis thaliana
  peptide (1)..(308): Ceres Seq. ID no. 13667851
MEAMHAPVYFEPFEVHGDMKSLPEGLLESIKKNKVCLKGGLKTPVGGGVSSLNVNLRKELDLFASLVNCFNLPGLASRHENVDIVVIRENTEGEYAGLEHEVVPGVVESLKVITKFCSERIAKYAFEYAYLNNRKKVTAVHKANIMKLADGLFLESCQEVAKKYPSIAYNEIIVDNCCMQLVARPEQFDVMVTPNLYGNLVANTAAGIAGGSGVMPGGNVGAEYAVFEQGASAGNVGKDTTEEQKNANPVALLLSSAMMLRHLQFPSFADRLETAVKRVIAEGNCRTEDLGGNSTTQEVVDAVIANLD

SEQ ID NO: 108575 - DNA, 1379 bp, Arabidopsis thaliana
  misc_feature (1)..(1379): Ceres Seq. ID no. 13667852
  misc_feature (1)..(1379): Ortholog of  Ceres SEQ ID NO 14313264 as cited in SEQ ID NO 67300
  misc_feature (1)..(1379): Ortholog of  Ceres SEQ ID NO 14302824 as cited in SEQ ID NO 67794
ccacgcgtcgtcttcttcttctctttcgatcaaatcttttcagattcaacccaaaattgaagacaaaaatgtctcgcagatcgctaactctcctcaagaatctagctagaaacgcgaatggatcaggtattcaaacccgatccgtgacttacatgcccagacccggtgacggagcaccacgcgcagtgacgctgatccccggagatggaatcggtcctctggtgacgaacgccgtggaacaggtgatggaagcgatgcacgctccgatcttcttcgagaagtacgatgttcacggagaaatgagccgtgtgccgccggaagtgatggagtcgataaggaagaataaggtttgtttgaaaggtgggcttaagactcctgttggtggtggtgttagttctcttaacgtccagcttaggaaagagcttgacctctttgcttctctggtcaactgttttaatttgcctggtttacctactcgccatgagaatgttgacatcgttgtcatcagagagaacactgaaggtgagtacgcggggcttgagcacgaggttgttcctggtgtcgttgagagtctgaaggtgatcacgaagttctgttcggagcgtattgcaaagtatgcttttgagtatgcctacctgaacaacaggaagaaagttacagcggtgcataaggctaacatcatgaaacttgcggatggtttgttcttggaatcttgtcgcgaggttgcgaaaaagtatcccagcatcacctacaatgaaatcattgttgataactgctgtatgcaacttgtagccaaaccagagcaattcgatgtcatggtaacgccgaatctctatgggaatttagttgcaaacactgctgctggtattgctggaggcacaggagtcatgcctggaggaaatgttggggctgaccatgcggtattcgagcaaggtgcatcagcaggaaatgttgggaaagacaagatagtattggaaaacaaagcaaacccagtggcattgcttctctcatcagcgatgatgcttagacaccttcagtttccttcatttgctgaccggcccgaaacagcagtgaagaaagtcaccgctgaaggaaagtgccggacgaaagatcttggtggaacaagcacgacccaagaggtcgttgatgcgggcattgcaaaactagactgactttgacaaattacgtggtcccgccctgcataaatcatcaaaaccctgatacagattttgtgttgccaaaatatggggtatgatccaagcacaacggttatctggttttgtacctcgagttttattatattctttagccgtggaatatttcgataagaaaaaaaaacatgttccaaataattcatgttgctacgtttgttggcgcct

SEQ ID NO: 108576 - protein, 389 aa, Arabidopsis thaliana
  peptide (1)..(389): Ceres Seq. ID no. 13667853
TRRLLLLFRSNLFRFNPKLKTKMSRRSLTLLKNLARNANGSGIQTRSVTYMPRPGDGAPRAVTLIPGDGIGPLVTNAVEQVMEAMHAPIFFEKYDVHGEMSRVPPEVMESIRKNKVCLKGGLKTPVGGGVSSLNVQLRKELDLFASLVNCFNLPGLPTRHENVDIVVIRENTEGEYAGLEHEVVPGVVESLKVITKFCSERIAKYAFEYAYLNNRKKVTAVHKANIMKLADGLFLESCREVAKKYPSITYNEIIVDNCCMQLVAKPEQFDVMVTPNLYGNLVANTAAGIAGGTGVMPGGNVGADHAVFEQGASAGNVGKDKIVLENKANPVALLLSSAMMLRHLQFPSFADRPETAVKKVTAEGKCRTKDLGGTSTTQEVVDAGIAKLD

SEQ ID NO: 108577 - protein, 367 aa, Arabidopsis thaliana
  peptide (1)..(367): Ceres Seq. ID no. 13667854
MSRRSLTLLKNLARNANGSGIQTRSVTYMPRPGDGAPRAVTLIPGDGIGPLVTNAVEQVMEAMHAPIFFEKYDVHGEMSRVPPEVMESIRKNKVCLKGGLKTPVGGGVSSLNVQLRKELDLFASLVNCFNLPGLPTRHENVDIVVIRENTEGEYAGLEHEVVPGVVESLKVITKFCSERIAKYAFEYAYLNNRKKVTAVHKANIMKLADGLFLESCREVAKKYPSITYNEIIVDNCCMQLVAKPEQFDVMVTPNLYGNLVANTAAGIAGGTGVMPGGNVGADHAVFEQGASAGNVGKDKIVLENKANPVALLLSSAMMLRHLQFPSFADRPETAVKKVTAEGKCRTKDLGGTSTTQEVVDAGIAKLD

SEQ ID NO: 108578 - protein, 339 aa, Arabidopsis thaliana
  peptide (1)..(339): Ceres Seq. ID no. 13667855
MPRPGDGAPRAVTLIPGDGIGPLVTNAVEQVMEAMHAPIFFEKYDVHGEMSRVPPEVMESIRKNKVCLKGGLKTPVGGGVSSLNVQLRKELDLFASLVNCFNLPGLPTRHENVDIVVIRENTEGEYAGLEHEVVPGVVESLKVITKFCSERIAKYAFEYAYLNNRKKVTAVHKANIMKLADGLFLESCREVAKKYPSITYNEIIVDNCCMQLVAKPEQFDVMVTPNLYGNLVANTAAGIAGGTGVMPGGNVGADHAVFEQGASAGNVGKDKIVLENKANPVALLLSSAMMLRHLQFPSFADRPETAVKKVTAEGKCRTKDLGGTSTTQEVVDAGIAKLD

SEQ ID NO: 108579 - DNA, 949 bp, Arabidopsis thaliana
  misc_feature (1)..(949): Ceres Seq. ID no. 13667856
  misc_feature (1)..(949): Ortholog of  Ceres SEQ ID NO 14312572 as cited in SEQ ID NO 55151
ccgggcaggtctctctccaatctctctgcgccacagaattgtgcgatttacgaaaatctctgaaacctccgatcgttaacggcgaccgccgattttcccggtaaaaatgaacgacggagatgtatcgaggcagatccagcagatggtgagatttatccgccaagaagcggaagagaaagcaaacgagatctcggttcctgctgaagaagaattcaacattgagaaactccagcttgttgaggcggagaagaagaagatcaggcaagattatgagaagaaggagaagcaagctgatgttcgcaagaagattgattactctatgcagctaaatgcatcaaggatcaaagttcttcaagcgcaagacgatattgtcaatgccatgaaagaccaagcagctaaggatcttctgaacgttagtcgcgatgagtatgcctacaaacagctcctcaaggatctaattgttcagtgtttgcttcggttgaaagaaccttctgtgttgttgcgttgtcgtgaagaggacttgggtttagtggaagctgtacttgatgacgcaaaggaggaatatgctggtaaagcaaaggttcatgccccagaggttgctgttgacacaaaaatattccttccccctcctcctaaatctaatgatcctcatggtctccactgctctggaggtgttgtgttagcttctcgtgatgggaaaatcgtgtgcgagaacacacttgatgcgcgtcttgatgtggcattccgtatgaaactcccagtgatccgtaagtcgttgttcggccaagttactgcctgatgaaagaaaggaaaagagaaaagagattattcaaaccggtttgcgtttggttatttacctattttgggagagatttctctttgttgtgattctttgtattttgcaaaatcttactttggtgccaaacccatcgaacgcttctttttttcg

SEQ ID NO: 108580 - protein, 230 aa, Arabidopsis thaliana
  peptide (1)..(230): Ceres Seq. ID no. 13667857
MNDGDVSRQIQQMVRFIRQEAEEKANEISVPAEEEFNIEKLQLVEAEKKKIRQDYEKKEKQADVRKKIDYSMQLNASRIKVLQAQDDIVNAMKDQAAKDLLNVSRDEYAYKQLLKDLIVQCLLRLKEPSVLLRCREEDLGLVEAVLDDAKEEYAGKAKVHAPEVAVDTKIFLPPPPKSNDPHGLHCSGGVVLASRDGKIVCENTLDARLDVAFRMKLPVIRKSLFGQVTA

SEQ ID NO: 108581 - protein, 218 aa, Arabidopsis thaliana
  peptide (1)..(218): Ceres Seq. ID no. 13667858
MVRFIRQEAEEKANEISVPAEEEFNIEKLQLVEAEKKKIRQDYEKKEKQADVRKKIDYSMQLNASRIKVLQAQDDIVNAMKDQAAKDLLNVSRDEYAYKQLLKDLIVQCLLRLKEPSVLLRCREEDLGLVEAVLDDAKEEYAGKAKVHAPEVAVDTKIFLPPPPKSNDPHGLHCSGGVVLASRDGKIVCENTLDARLDVAFRMKLPVIRKSLFGQVTA

SEQ ID NO: 108582 - protein, 159 aa, Arabidopsis thaliana; identical to SEQ ID NO: 47292
  peptide (1)..(159): Ceres Seq. ID no. 13667859

SEQ ID NO: 108583 - DNA, 1179 bp, Arabidopsis thaliana
  misc_feature (1)..(1179): Ceres Seq. ID no. 13667860
  misc_feature (1)..(1179): Ortholog of  Ceres SEQ ID NO 14314534 as cited in SEQ ID NO 52434
  misc_feature (1)..(1179): Ortholog of  Ceres SEQ ID NO 12619999 as cited in SEQ ID NO 66123
  misc_feature (1)..(1179): Ortholog of  Ceres SEQ ID NO 13656436 as cited in SEQ ID NO 69154
aattcggcacgaggaaaaattccattttcctccattgattgtgagtgagaacaaacatttaaagcttcttactcaaagtttctttctttatagatctcaaaaaattcgatatttttctcgattcatccgccattaaggttttattgcgagatcgaagagagaaggagaaaatgacgcatagagtagatcaggaatatgattatttgtttaagattgtgttgattggtgattctggtgttgggaaatcgaatatcttgtcgagattcaccaggaatgagttttgcttggaatctaaatccactattggtgttgaattcgccaccagaactactcaggttgaaggaaagaccattaaggcccagatctgggacactgcaggtcaggagaggtacagggcgatcacaagcgcgtattacagaggcgcagtgggtgcacttcttgtctacgacattactaagagacagacctttgacaatgttttaaggtggctgcgcgaactgagagaccatgcagattccaacattgtgatcatgatggctgggaacaaatccgatctgaaccacttgagatccgttgctgaggaagatggtcaaagtttggctgagaaggaaggtctctctttcctggagacatctgctcttgaagcaacaaacgtcgagaaagcgtttcagaccatcttaggtgagatctaccatatcataagcaaaaaggcactggctgcacaagaagcagcagcagctaattctgcaatccctgggcaaggaactacgattaacgtcgatgacacatctggaggcgcgaaacgagcatgttgctcttcttaaactaaaggtaaactgtttatttcggttgctccttgttcagagattcaaacttttgttttcactggcttctcttcttttcaagttttggctgatgaaacgtaactatgcaagactatgtagaatactctgtttttattctcttcggtttggggtttgtgttcagtttaaagcttgttagtagtatacttagaatcttctggtgcttgcttgctttcccttcttcttcccttggtgtgtttctattgatttctggtttataaagtattttttctatctccggtttagtccggttcgtcttggctttgtttaatcaaatcattgattcctctcttatcaatgtattgtatccggttcc

SEQ ID NO: 108584 - protein, 217 aa, Arabidopsis thaliana; identical to SEQ ID NO: 23142
  peptide (1)..(217): Ceres Seq. ID no. 13667861

SEQ ID NO: 108585 - DNA, 2178 bp, Arabidopsis thaliana
  misc_feature (1)..(2178): Ceres Seq. ID no. 13667862
  misc_feature (1)..(2178): Ortholog of  Ceres SEQ ID NO 15174638 as cited in SEQ ID NO 53185
  misc_feature (1)..(2178): Ortholog of  Ceres SEQ ID NO 13657460 as cited in SEQ ID NO 66115
  misc_feature (1)..(2178): Ortholog of  Ceres SEQ ID NO 13659394 as cited in SEQ ID NO 67049
gcacgagaagattcttcacctagagaagtcacatgttccttcttcttcttccttcatcatccccaaacacacacaaactaaaaaaaaggcaaaaccttagatccaagatcagacctaatctaatcgaaactcatagctgaaaaatgaagagagatcatcatcaattccaaggtcgattgtccaaccacgggacttcttcttcttcatcatcaatttctaaagataagatgatgatggtaaaaaaagaagaagacggtggaggtaacatggacgatgagcttctcgctgttttaggttacaaagttaggtcatcggagatggcggaggttgctttgaaactcgaacaattagagacgatgatgagtaatgttcaagaagatggtttatctcatctcgcggcggatactgttcattataatccgtcggagctttattcttggcttgataatatgctctctgagcttaatcctcctcctcttccggcgagttctaacggtttagatccggttcttccttcgccggagatttgtggttttccggcttcggattatgaccttgaagtcattcccggaaacgcgatttatcagtttccggcgattgattcttcgtcttcgtcgaataatcagaacaagcgtttgaaatcatgctcgagtcctgattcaatggttacatcgacctcgacgggtacgcagattggtggagtcataggaacgacggtgacgacaaccacgacgacaacgacggcggcggctgagtcaactcggtctgttatcctggttgactcgcaagagaacggtgttcgtttagtacacgcgcttatggcttgtgcagaagcaatccagcagaataatttgactctagcggaagctcttgtgaagcaaatcggatgcttagctgtgtctcaagccggagctatgagaaaagtggctacttacttcgccgaagctttagcgcggcggatctaccgtctctctccgccgcagaatcagatcgatcattgtctctccgatactcttcagatgcacttttacgagacttgtccttatcttaaattcgctcacttcacggcgaaccaagcgattctcgaagcttttgaaggtaagaagagagtacacgtcattgatttctcgatgaaccaaggtcttcaatggcctgcgcttatgcaagctcttgcgcttcgagaaggaggtcctccaactttccggttaaccggaattggtccaccggcgccggataattctgatcatcttcatgaagttggttgtaaattagctcagcttgcggaggcggttcacgtagaattcgaataccgtggattcgttgctaacagcttagccgatctcgatgcttcgatgcttgagcttagaccgagcgatacggaagctgttgcggtgaactctgtttttgagctacataagctcttaggtcgtcccggtgggatagagaaagttctcggcgttgtgaaacagattaaaccggtgattttcacggtggttgagcaagaatcgaaccataacggaccggttttcttagaccggtttactgaatcgttacattattattcgactctgtttgattcgttggaaggagttccgaatagtcaagacaaagtcatgtctgaagtttacttagggaaacagatttgtaatctggtggcttgtgaaggtcctgacagagtcgagagacacgaaacgttgagtcaatggggaaaccggtttggttcgtccggtttagcgccggcacatcttgggtctaacgcgtttaagcaagcgagtatgcttttgtctgtgtttaatagtggccaaggttatcgtgtggaggagagtaatggatgtttgatgttgggttggcacactcgtccactcattaccacctccgcttggaaactctcgacggcggcgtactgagtttgactcgaagcatacgacggtggtggagtcgagtcgagtgaatttgagattgagatcagtggaccggtgatgacatatgttcggaccaagacctaaaccgaactgaatcgaaccgttttgccttttgtttattttatttattttcgttcacttgtttaaaattcttatatatatcgttttggtaggtcatttttaatttatgcctttttgggatcaatttttaataggctgagtttgtatttattaataaattatctttatgaatttt

SEQ ID NO: 108586 - protein, 587 aa, Arabidopsis thaliana
  peptide (1)..(587): Ceres Seq. ID no. 13667863
MKRDHHQFQGRLSNHGTSSSSSSISKDKMMMVKKEEDGGGNMDDELLAVLGYKVRSSEMAEVALKLEQLETMMSNVQEDGLSHLAADTVHYNPSELYSWLDNMLSELNPPPLPASSNGLDPVLPSPEICGFPASDYDLEVIPGNAIYQFPAIDSSSSSNNQNKRLKSCSSPDSMVTSTSTGTQIGGVIGTTVTTTTTTTTAAAESTRSVILVDSQENGVRLVHALMACAEAIQQNNLTLAEALVKQIGCLAVSQAGAMRKVATYFAEALARRIYRLSPPQNQIDHCLSDTLQMHFYETCPYLKFAHFTANQAILEAFEGKKRVHVIDFSMNQGLQWPALMQALALREGGPPTFRLTGIGPPAPDNSDHLHEVGCKLAQLAEAVHVEFEYRGFVANSLADLDASMLELRPSDTEAVAVNSVFELHKLLGRPGGIEKVLGVVKQIKPVIFTVVEQESNHNGPVFLDRFTESLHYYSTLFDSLEGVPNSQDKVMSEVYLGKQICNLVACEGPDRVERHETLSQWGNRFGSSGLAPAHLGSNAFKQASMLLSVFNSGQGYRVEESNGCLMLGWHTRPLITTSAWKLSTAAY

SEQ ID NO: 108587 - protein, 559 aa, Arabidopsis thaliana
  peptide (1)..(559): Ceres Seq. ID no. 13667864
MMMVKKEEDGGGNMDDELLAVLGYKVRSSEMAEVALKLEQLETMMSNVQEDGLSHLAADTVHYNPSELYSWLDNMLSELNPPPLPASSNGLDPVLPSPEICGFPASDYDLEVIPGNAIYQFPAIDSSSSSNNQNKRLKSCSSPDSMVTSTSTGTQIGGVIGTTVTTTTTTTTAAAESTRSVILVDSQENGVRLVHALMACAEAIQQNNLTLAEALVKQIGCLAVSQAGAMRKVATYFAEALARRIYRLSPPQNQIDHCLSDTLQMHFYETCPYLKFAHFTANQAILEAFEGKKRVHVIDFSMNQGLQWPALMQALALREGGPPTFRLTGIGPPAPDNSDHLHEVGCKLAQLAEAVHVEFEYRGFVANSLADLDASMLELRPSDTEAVAVNSVFELHKLLGRPGGIEKVLGVVKQIKPVIFTVVEQESNHNGPVFLDRFTESLHYYSTLFDSLEGVPNSQDKVMSEVYLGKQICNLVACEGPDRVERHETLSQWGNRFGSSGLAPAHLGSNAFKQASMLLSVFNSGQGYRVEESNGCLMLGWHTRPLITTSAWKLSTAAY

SEQ ID NO: 108588 - protein, 558 aa, Arabidopsis thaliana
  peptide (1)..(558): Ceres Seq. ID no. 13667865
MMVKKEEDGGGNMDDELLAVLGYKVRSSEMAEVALKLEQLETMMSNVQEDGLSHLAADTVHYNPSELYSWLDNMLSELNPPPLPASSNGLDPVLPSPEICGFPASDYDLEVIPGNAIYQFPAIDSSSSSNNQNKRLKSCSSPDSMVTSTSTGTQIGGVIGTTVTTTTTTTTAAAESTRSVILVDSQENGVRLVHALMACAEAIQQNNLTLAEALVKQIGCLAVSQAGAMRKVATYFAEALARRIYRLSPPQNQIDHCLSDTLQMHFYETCPYLKFAHFTANQAILEAFEGKKRVHVIDFSMNQGLQWPALMQALALREGGPPTFRLTGIGPPAPDNSDHLHEVGCKLAQLAEAVHVEFEYRGFVANSLADLDASMLELRPSDTEAVAVNSVFELHKLLGRPGGIEKVLGVVKQIKPVIFTVVEQESNHNGPVFLDRFTESLHYYSTLFDSLEGVPNSQDKVMSEVYLGKQICNLVACEGPDRVERHETLSQWGNRFGSSGLAPAHLGSNAFKQASMLLSVFNSGQGYRVEESNGCLMLGWHTRPLITTSAWKLSTAAY

SEQ ID NO: 108589 - DNA, 1286 bp, Arabidopsis thaliana
  misc_feature (1)..(1286): Ceres Seq. ID no. 13667873
  misc_feature (1)..(1286): Ortholog of  Ceres SEQ ID NO 15177854 as cited in SEQ ID NO 51851
  misc_feature (1)..(1286): Ortholog of  Ceres SEQ ID NO 15177087 as cited in SEQ ID NO 51932
  misc_feature (1)..(1286): Ortholog of  Ceres SEQ ID NO 13662937 as cited in SEQ ID NO 64415
  misc_feature (1)..(1286): Ortholog of  Ceres SEQ ID NO 13595984 as cited in SEQ ID NO 68340
  misc_feature (1)..(1286): Ortholog of  Ceres SEQ ID NO 12635014 as cited in SEQ ID NO 0
ccacgcgtccggaaaatcttcaaagtgtttgcagagaaatctaaattcatcaacagttttttacaaaagaaatggaaaacggagaagcaaaacagagtgtacctcttctcactccctataagatgggaagattcaatctttcccatagggttgttctagcaccattgacgagacagagatcgtacggaaacgttcctcacgctgccatatattactctcagagaacgactccaggaggttttctcatcactgaagccactggagtttcagatacagctcaaggatatcaagatactcctgggatatggactaaagagcatgtggaggcatggaagccaatcgttgatgctgtacatgccaaaggtggtatcttcttctgtcagatctggcatgttggccgcgtttctaatagcgggtttcagccaaatggaaaagctcctatctcttgttcggataagccattgatgcctcaaattcgctctaatggcatcgatgaagctctctttacccctccaagacggcttggtatcgaagaaatccccggcattgtcaatgattttaggcttgctgcaagaaatgctatggaagctggttttgatggagttgagattcatggagctaatggctatctgattgaccagttcatgaaggatacggtgaatgatagaactgatgaatacggtggatcattgcaaaaccgttgcaaatttcctctagaaatagtcgatgcagttgctaaggagatcggaccagaccgtgttggaatcaggctctctccatttgctgactacatggaatctggagacactaatccaggagcattagggctttatatggcggaatctttgaacaaatacggaatcctctactgtcatgtgattgaagcgagaatgaaaacaatgggagaagtacatgcttgtcctcacacactaatgccgatgaggaaagcgtttaaggggacttttatctccgcaggaggtttcacgagggaagatgggaatgaggctgtgtcaaagggaagaactgatttggtggcttatggtcgatggtttctagccaacccggacctgccaaagaggttccaagtggatgcaccgctgaataagtacgatagaccaacgttttacacttctgatccagtcgtcggttacaccgattaccctttcctcgaatcaacagcttaaaattgttatcaataatgtaatgtagtgtgtttcccttatataagatgtaataagtttctggcttttcatttatactttttaagtttaagtcataaaaccttc

SEQ ID NO: 108590 - protein, 370 aa, Arabidopsis thaliana
  peptide (1)..(370): Ceres Seq. ID no. 13667874
MENGEAKQSVPLLTPYKMGRFNLSHRVVLAPLTRQRSYGNVPHAAIYYSQRTTPGGFLITEATGVSDTAQGYQDTPGIWTKEHVEAWKPIVDAVHAKGGIFFCQIWHVGRVSNSGFQPNGKAPISCSDKPLMPQIRSNGIDEALFTPPRRLGIEEIPGIVNDFRLAARNAMEAGFDGVEIHGANGYLIDQFMKDTVNDRTDEYGGSLQNRCKFPLEIVDAVAKEIGPDRVGIRLSPFADYMESGDTNPGALGLYMAESLNKYGILYCHVIEARMKTMGEVHACPHTLMPMRKAFKGTFISAGGFTREDGNEAVSKGRTDLVAYGRWFLANPDLPKRFQVDAPLNKYDRPTFYTSDPVVGYTDYPFLESTA

SEQ ID NO: 108591 - protein, 353 aa, Arabidopsis thaliana
  peptide (1)..(353): Ceres Seq. ID no. 13667875
MGRFNLSHRVVLAPLTRQRSYGNVPHAAIYYSQRTTPGGFLITEATGVSDTAQGYQDTPGIWTKEHVEAWKPIVDAVHAKGGIFFCQIWHVGRVSNSGFQPNGKAPISCSDKPLMPQIRSNGIDEALFTPPRRLGIEEIPGIVNDFRLAARNAMEAGFDGVEIHGANGYLIDQFMKDTVNDRTDEYGGSLQNRCKFPLEIVDAVAKEIGPDRVGIRLSPFADYMESGDTNPGALGLYMAESLNKYGILYCHVIEARMKTMGEVHACPHTLMPMRKAFKGTFISAGGFTREDGNEAVSKGRTDLVAYGRWFLANPDLPKRFQVDAPLNKYDRPTFYTSDPVVGYTDYPFLESTA

SEQ ID NO: 108592 - protein, 239 aa, Arabidopsis thaliana; identical to SEQ ID NO: 24534
  peptide (1)..(239): Ceres Seq. ID no. 13667876

SEQ ID NO: 108593 - DNA, 2183 bp, Arabidopsis thaliana
  misc_feature (1)..(2183): Ceres Seq. ID no. 13667877
  misc_feature (1)..(2183): Ortholog of  Ceres SEQ ID NO 15174638 as cited in SEQ ID NO 53185
  misc_feature (1)..(2183): Ortholog of  Ceres SEQ ID NO 13657460 as cited in SEQ ID NO 66115
  misc_feature (1)..(2183): Ortholog of  Ceres SEQ ID NO 13659394 as cited in SEQ ID NO 67049
agtaatttaggagaagtcacatgttccttcttcttcttccttcatcatccccaaacacacacaaactaaaaaaaaggcaaaaccctagatccaagatcagacctaatctaatcgaaactcatagctgaaaaatgaagagagatcatcaccaattccaaggtcgattgtccaaccacgggacttcttcttcttcatcatcaatctctaaagataagatgatgatggtgaaaaaagaagaagacggtggaggtaacatggacgacgagcttctcgctgttttaggttacaaagttaggtcatcggagatggcggaggttgctttgaaactcgaacaattagagacgatgatgagtaatgttcaagaagatggtttatctcatctcgcgacggatactgttcattataatccgtcggagctttattcttggcttgataatatgctctctgagcttaatcctcctcctcttccggcgagttctaacggtttagatccggttcttccttcgccggagatttgtggttttccggcttcggattatgaccttaaagtcattcccggaaacgcgatttatcagtttccggcgattgattcttcgtcttcgtcgaataatcagaacaagcgtttgaaatcatgctcgagtcctgattctatggttacatcgacttcgacgggtacgcagattggtggagtcataggaacgacggtgacgacaaccaccacgacaacgacggcggcggctgagtcaactcgttctgttatcctggttgactcgcaagagaacggtgttcgtttagtccacgcgcttatggcttgtgcagaagcaatccagcagaacaatttgactctagcggaagctcttgtgaagcaaatcggatgcttagctgtgtctcaagccggagctatgagaaaagtggctacttacttcgccgaagctttagctcggcggatctaccgtctctctccgccgcagaatcagatcgatcattgtctctccgatactcttcagatgcacttttacgagacttgtccttatcttaaattcgctcacttcacggcgaaccaagcgattctcgaagcttttgaaggtaagaagagagtacacgtcattgatttctcgatgaaccaaggtcttcaatggcctgcgcttatgcaagctcttgcgcttcgagaaggaggtcctccaactttccggttaaccggaattggtccaccggcgccggataattctgatcatcttcatgaagttggttgtaaattagctcagcttgcggaggcgattcacgtagaattcgaataccgtggattcgttgctaacagcttagccgatctcgatgcttcgatgcttgagcttagaccgagcgatacggaagctgttgcggtgaactctgtttttgagctacataagctcttaggtcgtcccggtgggatagagaaagttctcggcgttgtgaaacagattaaaccggtgattttcacggtggttgagcaagaatcgaaccataacggaccggttttcttagaccggtttactgaatcgttacattattattcgactctgtttgattcgttggaaggagttccgaatagtcaagacaaagtcatgtctgaagtttacttagggaaacagatttgtaatctggtggcttgtgaaggtcctgacagagtcgagagacacgaaacgttgagtcaatggggaaaccggtttggttcgtccggtttagcgccggcacatcttgggtctaacgcgtttaagcaagcgagtatgcttttgtctgtgtttaatagtggccaaggttatcgtgtggaggagagtaatggatgtttgatgttgggttggcacactcgcccactcattaccacctccgcttggaaactctcgacggcggcgcactgagtttgactcgaagcatacgacggtggtggagtcgagtcgagtgaatttgagattgagatcagtggaccggtgatgacatatgttcggaccaagacctaaaccgaactgaatcgaaccgttttgccttttgtttattttatttattttcgttcacttgtttaaaattcttatatatatcgttttggtaggtcattttataatttatgcctttttgggatcaatttttaataggctgagtttgtatttattaataaatatcttatgaattttaaaataaaattatgtttt

SEQ ID NO: 108594 - protein, 587 aa, Arabidopsis thaliana; identical to SEQ ID NO: 47148
  peptide (1)..(587): Ceres Seq. ID no. 13667878

SEQ ID NO: 108595 - protein, 559 aa, Arabidopsis thaliana; identical to SEQ ID NO: 47149
  peptide (1)..(559): Ceres Seq. ID no. 13667879

SEQ ID NO: 108596 - protein, 558 aa, Arabidopsis thaliana; identical to SEQ ID NO: 47150
  peptide (1)..(558): Ceres Seq. ID no. 13667880

SEQ ID NO: 108597 - DNA, 1388 bp, Arabidopsis thaliana
  misc_feature (1)..(1388): Ceres Seq. ID no. 13667888
  misc_feature (1)..(1388): Ortholog of  Ceres SEQ ID NO 12617323 as cited in SEQ ID NO 64129
cacgcgtccgagcatttgtctctgaaatcccagatccgaaaaccaacaatggcgtcagagaacaacggatccagatccgattccgaatccatcaccgctcccaaagctgattccaccgtcgttgaaccgaggaagatagctctgatcaccggaatcaccggccaggacggatcatacctgacggagttccttctcggaaaaggctacgaagttcatggtctgatccgtcgatcatcgaatttcaacacccagcgaatcaaccatatctacatcgatccacacaatgtcaacaaagctctgatgaaactccactacgccgatctcaccgacgcttcctctctccgtcgttggatcgatgtgatcaaacctgacgaagtttataacctagctgctcaatctcacgtcgctgtctccttcgagatccctgattacacagccgatgtagtcgcaaccggtgctctccgtctccttgaagccgtcagatctcacaccatcgacagtggccgtaccgtcaagtattaccaagccggatcttcggagatgtttggatcaactcctcctccacaatcggagacgacgccgtttcaccccagatctccttacgcagcttccaaatgcgctgctcattggtacacagtgaattacagagaggcgtacggtctcttcgcttgtaacggaatcttgttcaatcacgagtcacctcgccgtggtgagaatttcgtgacgaggaagatcacaagagcattgggaaggatcaaggttggtttgcagacgaagctattccttgggaatttgcaagcgtcaagagattggggatttgcaggagattatgtggaagcaatgtggttgatgttgcagcaagagaagccagatgattacgttgtggcaacagaggaaggacacacagtggaagagtttcttgatgtgtcatttgggtatttgggactcaattggaaagattatgttgagattgaccagaggtactttaggcctgctgaagtagataaccttcaaggagatgcaagcaaggcaaaggaagtgttggggtggaaaccacaagtagggtttgagaagcttgtgaagatgatggttgatgaagatcttgagcttgctaagagggagaaagtgcttgttgatgctggatacatggatgctaagcagcaaccttgatttgatcaattatacaaagatggagtttcttacatttatctgcttttatagagttttaaatttcgtttttttttctttctctttttgttgctttggtggttgtttgttgtctttttatgttttagtttctttgttgctttttaagttatctaaattgtttccctccaatgagttgaggatgaaagcgcagtgaattttgaatgaaggagcaaagaatc

SEQ ID NO: 108598 - protein, 389 aa, Arabidopsis thaliana
  peptide (1)..(389): Ceres Seq. ID no. 13667889
HASEHLSLKSQIRKPTMASENNGSRSDSESITAPKADSTVVEPRKIALITGITGQDGSYLTEFLLGKGYEVHGLIRRSSNFNTQRINHIYIDPHNVNKALMKLHYADLTDASSLRRWIDVIKPDEVYNLAAQSHVAVSFEIPDYTADVVATGALRLLEAVRSHTIDSGRTVKYYQAGSSEMFGSTPPPQSETTPFHPRSPYAASKCAAHWYTVNYREAYGLFACNGILFNHESPRRGENFVTRKITRALGRIKVGLQTKLFLGNLQASRDWGFAGDYVEAMWLMLQQEKPDDYVVATEEGHTVEEFLDVSFGYLGLNWKDYVEIDQRYFRPAEVDNLQGDASKAKEVLGWKPQVGFEKLVKMMVDEDLELAKREKVLVDAGYMDAKQQP

SEQ ID NO: 108599 - protein, 373 aa, Arabidopsis thaliana
  peptide (1)..(373): Ceres Seq. ID no. 13667890
MASENNGSRSDSESITAPKADSTVVEPRKIALITGITGQDGSYLTEFLLGKGYEVHGLIRRSSNFNTQRINHIYIDPHNVNKALMKLHYADLTDASSLRRWIDVIKPDEVYNLAAQSHVAVSFEIPDYTADVVATGALRLLEAVRSHTIDSGRTVKYYQAGSSEMFGSTPPPQSETTPFHPRSPYAASKCAAHWYTVNYREAYGLFACNGILFNHESPRRGENFVTRKITRALGRIKVGLQTKLFLGNLQASRDWGFAGDYVEAMWLMLQQEKPDDYVVATEEGHTVEEFLDVSFGYLGLNWKDYVEIDQRYFRPAEVDNLQGDASKAKEVLGWKPQVGFEKLVKMMVDEDLELAKREKVLVDAGYMDAKQQP

SEQ ID NO: 108600 - protein, 289 aa, Arabidopsis thaliana; identical to SEQ ID NO: 28616
  peptide (1)..(289): Ceres Seq. ID no. 13667891

SEQ ID NO: 108601 - DNA, 1538 bp, Arabidopsis thaliana
  misc_feature (1)..(1538): Ceres Seq. ID no. 13667894
  misc_feature (1)..(1538): Ortholog of  Ceres SEQ ID NO 15175898 as cited in SEQ ID NO 57344
tcgacccacgctccggcgttctgatcaaaactccagtgaaagttcaaagtacacagagagaaacaaaaaaagaagaagaagaagttgaagaagaagaagccatgaatgctttagcagcaacaaacagaaacttcaagttagctgctaggcttcttggtctggattctaagctcgagaaaagtcttctcatccccttccgagaaatcaaggtggaatgtaccataccgaaagacgatggtacactagcatcattcgttgggttcagagttcaacacgacaatgcaagaggtcccatgaaaggtggaatcagatatcatcctgaggttgatccggatgaagtgaacgcattggctcagctcatgacatggaaaacagcagtggctaagattccttacggaggagctaaaggagggattggttgtgatcctagcaagctcagtatctccgagctcgagcggttgactcgagttttcactcagaagattcatgatctcattgggattcatactgatgttccagctccagatatgggcactggtcctcagacaatggcttggattcttgatgaatactctaagtttcatggatactcgcctgcagttgtgactggaaaacccattgatcttggtggatcgctagggagagacgcggctactggaagaggagtgatgtttggtaccgaagctttgcttaacgagcacggaaagaccatatcagggcagcgttttgtcatccagggatttggtaatgtgggttcttgggcggcaaagctgataagtgaaaagggtgggaagattgttgccgtgagtgacattaccggagcaatcaagaacaaggatggtatcgatatcccggccttgctcaagcatactaaagaacacagaggtgtcaaagggtttgatggtgcagatccgatcgatccaaactccatactggttgaggattgtgatatcctcgtccctgcagcacttggtggtgtcatcaacagggagaatgcgaatgagattaaagcaaagttcatcatagaagcagctaatcatccaactgatccggacgcggatgagatcctaagtaagaaaggtgtggttattctcccggacatatatgcaaactctggaggagtcactgtaagttacttcgaatgggttcagaacattcaaggctttatgtgggaggaagagaaggtgaacgatgagctaaagacttacatgactcgctctttcaaggacttgaaagagatgtgcaaaactcactcttgcgatctccggatgggagctttcacactcggtgttaatcgtgtggctcaagctaccattctcagaggctggggagcttaaagattatctaatctcttatgcaatctctttagcagctcctgaataagaattgagccaaactttaatctactttttgttttatcctcctactttggcttagaggtcatcctgagttaacagatatgtgtttacaagtactagaagacgcttctgtatgtaataaaaccttggactctaatagttaatgagcttttttactct

SEQ ID NO: 108602 - protein, 444 aa, Arabidopsis thaliana
  peptide (1)..(444): Ceres Seq. ID no. 13667895
DPRSGVLIKTPVKVQSTQRETKKEEEEVEEEEAMNALAATNRNFKLAARLLGLDSKLEKSLLIPFREIKVECTIPKDDGTLASFVGFRVQHDNARGPMKGGIRYHPEVDPDEVNALAQLMTWKTAVAKIPYGGAKGGIGCDPSKLSISELERLTRVFTQKIHDLIGIHTDVPAPDMGTGPQTMAWILDEYSKFHGYSPAVVTGKPIDLGGSLGRDAATGRGVMFGTEALLNEHGKTISGQRFVIQGFGNVGSWAAKLISEKGGKIVAVSDITGAIKNKDGIDIPALLKHTKEHRGVKGFDGADPIDPNSILVEDCDILVPAALGGVINRENANEIKAKFIIEAANHPTDPDADEILSKKGVVILPDIYANSGGVTVSYFEWVQNIQGFMWEEEKVNDELKTYMTRSFKDLKEMCKTHSCDLRMGAFTLGVNRVAQATILRGWGA

SEQ ID NO: 108603 - protein, 411 aa, Arabidopsis thaliana; identical to SEQ ID NO: 49352
  peptide (1)..(411): Ceres Seq. ID no. 13667896

SEQ ID NO: 108604 - protein, 347 aa, Arabidopsis thaliana; identical to SEQ ID NO: 49353
  peptide (1)..(347): Ceres Seq. ID no. 13667897

SEQ ID NO: 108605 - DNA, 1415 bp, Arabidopsis thaliana
  misc_feature (1)..(1415): Ceres Seq. ID no. 13667905
  misc_feature (1)..(1415): Ortholog of  Ceres SEQ ID NO 15171430 as cited in SEQ ID NO 51500
  misc_feature (1)..(1415): Ortholog of  Ceres SEQ ID NO 15172476 as cited in SEQ ID NO 54945
  misc_feature (1)..(1415): Ortholog of  Ceres SEQ ID NO 15176106 as cited in SEQ ID NO 60324
  misc_feature (1)..(1415): Ortholog of  Ceres SEQ ID NO 13654989 as cited in SEQ ID NO 63117
  misc_feature (1)..(1415): Ortholog of  Ceres SEQ ID NO 13584744 as cited in SEQ ID NO 69137
gaattccgtgatatattgtgagaagattgcagaagcgtgtccaacttggttccctctctctctgaaattactcaatcatggggatttgcttgagtgctcaggtcaaagctgagagctcaggagcgagtacgaagtatgacgccaaagatataggaagtcttgggagcaaggcttcgtctgtgtctgtaagaccaagccctcgaactgagggtgagatcttacagtctccaaatctcaagagttttagctttgctgagcttaaatcagcaaccaggaattttagaccagacagtgtgcttggtgaaggtggattcggttgtgttttcaaaggatggattgatgagaagtctctcactgcctcaagaccaggcacgggtttggttattgccgtcaaaaagcttaaccaagatggttggcaaggtcaccaggagtggctggctgaagtgaattaccttggtcagttttctcaccgtcaccttgtgaagctgattggttattgcctagaggatgagcaccgtcttcttgtttacgagttcatgcctcggggtagcttggagaatcatcttttcaggagaggtttgtacttccaaccgttatcttggaaacttcggttgaaagttgctcttggtgctgcaaagggacttgcttttcttcacagttccgagacaagagtgatataccgagatttcaagacttctaatatccttcttgactcggagtacaacgcaaagctttctgattttgggttggctaaggatgggccaataggtgataaaagtcatgtctctacacgagtcatgggtacacacggatatgcagctcctgaataccttgcaaccggtcatctaacaacaaagagtgatgtctatagcttcggggttgtccttctggagctgttgtctggtcgtcgagcagtggacaagaaccgcccatctggagagaggaaccttgtggagtgggctaaaccatacctcgtaaacaaaagaaagatattccgagtcattgataatcgtcttcaggaccagtactctatggaagaagcatgtaaagtggctactctgtctctgagatgtctcaccacagagattaagctgagaccaaacatgagcgaggttgtttcgcacctcgaacacattcagtctttaaatgctgctataggaggaaatatggataaaacagatagaagaatgcgtaggagaagtgacagtgttgtcagcaaaaaagtgaatgcaggttttgctcgacagactgctgttggcagtacagttgttgcttatcctcgcccatcagcctcgccactgtatgtttgaatagggttaaacacgtcctgggtctgtgttcagtgttcttggtaaaacatttgcaggacatgaagttcctatatcatgtcctgagaatggaatctggaggaattc

SEQ ID NO: 108606 - protein, 410 aa, Arabidopsis thaliana; identical to SEQ ID NO: 49420
  peptide (1)..(410): Ceres Seq. ID no. 13667906

SEQ ID NO: 108607 - protein, 257 aa, Arabidopsis thaliana; identical to SEQ ID NO: 49421
  peptide (1)..(257): Ceres Seq. ID no. 13667907

SEQ ID NO: 108608 - DNA, 1187 bp, Arabidopsis thaliana
  misc_feature (1)..(1187): Ceres Seq. ID no. 13667908
  misc_feature (1)..(1187): Ortholog of  Ceres SEQ ID NO 13503476 as cited in SEQ ID NO 61978
  misc_feature (1)..(1187): Ortholog of  Ceres SEQ ID NO 12578438 as cited in SEQ ID NO 62201
  misc_feature (1)..(1187): Ortholog of  Ceres SEQ ID NO 12617675 as cited in SEQ ID NO 64656
tcttcttcattagcctttcgtctccttcttctcttctctatctctctttagcttctctacgcaagcttattatctctttctcttaaagctttttctatatacaaacagaagcgtttgatactgtaaaaaagatttagaaatggagactctgagtcgtttattggttttcatgtctctgttttccggtttagtttctggatttgctctgcaaaatcttccaatcacatcttttgaagaaagttacactcaactttttggtgacaagaacttatttgttcatcaagatggcaaatctgtccggttaacgctcgatgaaagaaccggttccggttttgtttcaaatgattattacttgcatggattcttcagtgcttcaattaaattaccttctgattatacagctggagttgttgttgccttttatatgtctaatggagatatgtatgagaagaatcatgatgagatagattttgagtttcttggtaacattagagaaaaagaatggagagttcagacaaacatttacggtaatggaagtactcattcaggaagagaagagagatataatctctggtttgatcctactgaagattttcatcaatacagtatcctctggtctgattctcacatcatattctttgtagacaatgttcctattagagaggtcaaacgtactgcggaaatgggtggtcactttccatcaaagccgatgtctctctacacaacaatatgggacggttctaaatgggcaactaacggtggaaagtacggtgtaaactacaaatatgcgccttacattgcgcggttctcggatctagtcctgcacggctgccccgtggaccctatcgagcagtttccgaggtgcgatgaaggcgcggctgaggatatgcgtgcggcgcaagagattactccttcacaaaggagtaaaatggatgttttcagacggagactcatgacatattcatattgctatgatcgggctaggtacaatgttgctttatcggagtgtgtggtgaatcccgctgaggctcaaaggcttagggtttatgatccggtcagatttggcggcattccgaggcgccaccgcaatggaaagcaccggagcaagagaagccgggttgatggaaccgagtcgatatgataacatatataggcaaaatagtatgggtgagatttggccggaattc

SEQ ID NO: 108609 - protein, 333 aa, Arabidopsis thaliana; identical to SEQ ID NO: 30673
  peptide (1)..(333): Ceres Seq. ID no. 13667909

SEQ ID NO: 108610 - protein, 323 aa, Arabidopsis thaliana; identical to SEQ ID NO: 30674
  peptide (1)..(323): Ceres Seq. ID no. 13667910

SEQ ID NO: 108611 - protein, 238 aa, Arabidopsis thaliana; identical to SEQ ID NO: 30675
  peptide (1)..(238): Ceres Seq. ID no. 13667911

SEQ ID NO: 108612 - DNA, 1362 bp, Arabidopsis thaliana
  misc_feature (1)..(1362): Ceres Seq. ID no. 13667920
  misc_feature (1)..(1362): Ortholog of  Ceres SEQ ID NO 15177750 as cited in SEQ ID NO 57772
  misc_feature (1)..(1362): Ortholog of  Ceres SEQ ID NO 13596581 as cited in SEQ ID NO 62420
  misc_feature (1)..(1362): Ortholog of  Ceres SEQ ID NO 13591273 as cited in SEQ ID NO 65904
  misc_feature (1)..(1362): Ortholog of  Ceres SEQ ID NO 13623086 as cited in SEQ ID NO 0
gcacgaggagagaactactctctctatctctctttctctctatctctctctatctctctcatttcttcctgcgtcaatggcgactcaaggtcaggttatcacttgcaaagctgcggtggcttacgagccgaacaagcctctggtcatcgaagatgtgcaagtggctccacctcaagctggtgaggttcggatcaagatcctctacactgctctttgtcacaccgacgcttacacttggagcggcaaggatcctgaaggtctctttccttgtattctaggtcatgaggctgctgggattgttgagagtgttggtgaaggagtaactgaagttcaagctggagatcatgttatcccttgttatcaagctgagtgtcgtgaatgcaagttttgcaaatctgggaagactaacctttgtggcaaggtgagatctgctactggtgttgggattatgatgaatgaccgtaagtcgaggttctcggttaatgggaaacccatttatcacttcatgggtacttccacgtttagtcagtatactgttgttcatgatgttagcgtcgccaaaattgatcctactgctcctttggataaagtttgccttcttggatgtggtgttcccactggccttggagcagtttggaatactgcaaaagtagaaccagggtcaaatgttgccattttcggtcttggcactgttggacttgctgttgccgagggtgcgaaaacagctggtgcttcaaggatcattggcattgacatcgatagcaagaagtatgaaactgcaaagaagtttggtgttaacgaatttgtgaacccaaaggatcacgacaagccaattcaggaagtgattgtcgatctcactgatggcggtgttgactacagctttgagtgcatcgggaatgtctccgtgatgagagctgcattggagtgctgtcacaagggatggggaacttcggtcatagttggtgttgcagcatcaggacaagagatatcaactcgtccgttccaactcgtgactggccgtgtgtggaaaggaacagcttttggtggtttcaagagtcgaacccaagtgccttggcttgttgaaaagtacatgaacaaggagataaaagtggatgaatacataacacacaacttgagcttgggagaaatcaataaggctttcgatctattgcacgaaggtacttgccttcgttgtgtcctcgataccagcaaatgactataagggacctctctgctttaatctatgtgttcttgtgactttcgtcttttatcggtattgacatttcctaagagcaacagactactctactcgtgtgtgtctcgtttctatcttatgcttcaataaaatatcaattaagaccg

SEQ ID NO: 108613 - protein, 404 aa, Arabidopsis thaliana
  peptide (1)..(404): Ceres Seq. ID no. 13667921
HEERTTLSISLSLYLSLSLSFLPASMATQGQVITCKAAVAYEPNKPLVIEDVQVAPPQAGEVRIKILYTALCHTDAYTWSGKDPEGLFPCILGHEAAGIVESVGEGVTEVQAGDHVIPCYQAECRECKFCKSGKTNLCGKVRSATGVGIMMNDRKSRFSVNGKPIYHFMGTSTFSQYTVVHDVSVAKIDPTAPLDKVCLLGCGVPTGLGAVWNTAKVEPGSNVAIFGLGTVGLAVAEGAKTAGASRIIGIDIDSKKYETAKKFGVNEFVNPKDHDKPIQEVIVDLTDGGVDYSFECIGNVSVMRAALECCHKGWGTSVIVGVAASGQEISTRPFQLVTGRVWKGTAFGGFKSRTQVPWLVEKYMNKEIKVDEYITHNLSLGEINKAFDLLHEGTCLRCVLDTSK

SEQ ID NO: 108614 - protein, 379 aa, Arabidopsis thaliana
  peptide (1)..(379): Ceres Seq. ID no. 13667922
MATQGQVITCKAAVAYEPNKPLVIEDVQVAPPQAGEVRIKILYTALCHTDAYTWSGKDPEGLFPCILGHEAAGIVESVGEGVTEVQAGDHVIPCYQAECRECKFCKSGKTNLCGKVRSATGVGIMMNDRKSRFSVNGKPIYHFMGTSTFSQYTVVHDVSVAKIDPTAPLDKVCLLGCGVPTGLGAVWNTAKVEPGSNVAIFGLGTVGLAVAEGAKTAGASRIIGIDIDSKKYETAKKFGVNEFVNPKDHDKPIQEVIVDLTDGGVDYSFECIGNVSVMRAALECCHKGWGTSVIVGVAASGQEISTRPFQLVTGRVWKGTAFGGFKSRTQVPWLVEKYMNKEIKVDEYITHNLSLGEINKAFDLLHEGTCLRCVLDTSK

SEQ ID NO: 108615 - protein, 255 aa, Arabidopsis thaliana
  peptide (1)..(255): Ceres Seq. ID no. 13667923
MMNDRKSRFSVNGKPIYHFMGTSTFSQYTVVHDVSVAKIDPTAPLDKVCLLGCGVPTGLGAVWNTAKVEPGSNVAIFGLGTVGLAVAEGAKTAGASRIIGIDIDSKKYETAKKFGVNEFVNPKDHDKPIQEVIVDLTDGGVDYSFECIGNVSVMRAALECCHKGWGTSVIVGVAASGQEISTRPFQLVTGRVWKGTAFGGFKSRTQVPWLVEKYMNKEIKVDEYITHNLSLGEINKAFDLLHEGTCLRCVLDTSK

SEQ ID NO: 108616 - DNA, 846 bp, Arabidopsis thaliana
  misc_feature (1)..(846): Ceres Seq. ID no. 13667931
  misc_feature (1)..(846): Ortholog of  Ceres SEQ ID NO 13638595 as cited in SEQ ID NO 52050
  misc_feature (1)..(846): Ortholog of  Ceres SEQ ID NO 14301870 as cited in SEQ ID NO 61501
  misc_feature (1)..(846): Ortholog of  Ceres SEQ ID NO 12583993 as cited in SEQ ID NO 68098
cgccagtgtgagtaatttaggtactatcttcctcttaaaccaaccattcaaaatgttgcgtactatcttcctcttatctcttctctttggtctatccaatgcctctgttcaagatttctgtgtcgcaaacctgaaacgcgctgaaacccctgcgggttacccttgcattcgtcccattcatgtcaaagctacagactttgtcttctctggcttaggcactcctggaaacactacaaacatcatcaacgccgctgtcacacccgctttcgcagctcagttcccgggtctgaacggtctagccctctctacagctagacttgacttagctcctaaaggtgtgatcccaatgcacactcaccctggtgcctctgaggttctctttgtccttactggctccattaccgctgggtttgtctcctcggcaaacgctgtctacgtgcagacactcaaaccaggacaggtcatggttttcccacagggcttgcttcatttccagatcaacgcgggaaaatcctctgcttcagccgttgtcactttcaacagcgctaatcggggtctgcagattctcgacttcgcactctttgctaacagtcttcccactgaactcgtcgtgggtactactttccttgacgccactacagtcaagaagctaaagggtgttcttggaggaactggctaaaaaaagacttaggactactccttgactaaaacaccaaaacctgtttcttcatctttttttctctttaagtgattcttgtcttctctgttttgtgtgccttgtaattcttcaaaacctgtccaaattgttacattgtatgtgagttttttcctaaattactcacactg

SEQ ID NO: 108617 - protein, 225 aa, Arabidopsis thaliana
  peptide (1)..(225): Ceres Seq. ID no. 13667932
ASVSNLGTIFLLNQPFKMLRTIFLLSLLFGLSNASVQDFCVANLKRAETPAGYPCIRPIHVKATDFVFSGLGTPGNTTNIINAAVTPAFAAQFPGLNGLALSTARLDLAPKGVIPMHTHPGASEVLFVLTGSITAGFVSSANAVYVQTLKPGQVMVFPQGLLHFQINAGKSSASAVVTFNSANRGLQILDFALFANSLPTELVVGTTFLDATTVKKLKGVLGGTG

SEQ ID NO: 108618 - protein, 208 aa, Arabidopsis thaliana
  peptide (1)..(208): Ceres Seq. ID no. 13667933
MLRTIFLLSLLFGLSNASVQDFCVANLKRAETPAGYPCIRPIHVKATDFVFSGLGTPGNTTNIINAAVTPAFAAQFPGLNGLALSTARLDLAPKGVIPMHTHPGASEVLFVLTGSITAGFVSSANAVYVQTLKPGQVMVFPQGLLHFQINAGKSSASAVVTFNSANRGLQILDFALFANSLPTELVVGTTFLDATTVKKLKGVLGGTG

SEQ ID NO: 108619 - DNA, 712 bp, Arabidopsis thaliana
  misc_feature (1)..(712): Ceres Seq. ID no. 13667941
  misc_feature (1)..(712): Ortholog of  Ceres SEQ ID NO 15176321 as cited in SEQ ID NO 52814
  misc_feature (1)..(712): Ortholog of  Ceres SEQ ID NO 12563124 as cited in SEQ ID NO 57104
  misc_feature (1)..(712): Ortholog of  Ceres SEQ ID NO 13598373 as cited in SEQ ID NO 62185
  misc_feature (1)..(712): Ortholog of  Ceres SEQ ID NO 12584664 as cited in SEQ ID NO 62232
  misc_feature (1)..(712): Ortholog of  Ceres SEQ ID NO 12617639 as cited in SEQ ID NO 65219
  misc_feature (1)..(712): Ortholog of  Ceres SEQ ID NO 15179982 as cited in SEQ ID NO 0
ccatcgtactcctcttcttttccccaaaaaaaaatgtctgaagttgagtaccggtgctttgtcggcggccttgcctgggccaccaatgatgaagatcttcaaaggacgttctcacagttcggcgacgttatcgattctaagatcattaacgaccgcgagagtggaagatcaaggggattcggattcgtcaccttcaaggacgagaaagccatgagggatgcgattgaagagatgaacggtaaagagctcgatggacgtgtcatcaccgtgaacgaggctcagtcgagaggtagcggcggtggcggaggaggccgtggtggaagcggtggtggttaccgcagcggaggcggtggtggatactcaggaggcggtggcggcggatactcaggaggaggcggtggtggttacgagagacgtagcggaggttacggatctggtggaggcggtggtggccgaggatacggtggtggtggacgccgtgagggaggtggctacggaggcggtgatggtggaagttacggaggcggtggtggcggctggtaatcaaagatagagttgtttgcgtgactgctgctctgcatttttggtttagatttggttttgtgtcaccacttctggtttgttatcgttcgtttgtttacttttttgatgaaacagtttcgtttaagtcttctttgtctggaacgaaatgttaattcgcgtgttgtttact

SEQ ID NO: 108620 - protein, 180 aa, Arabidopsis thaliana
  peptide (1)..(180): Ceres Seq. ID no. 13667942
PSYSSSFPQKKMSEVEYRCFVGGLAWATNDEDLQRTFSQFGDVIDSKIINDRESGRSRGFGFVTFKDEKAMRDAIEEMNGKELDGRVITVNEAQSRGSGGGGGGRGGSGGGYRSGGGGGYSGGGGGGYSGGGGGGYERRSGGYGSGGGGGGRGYGGGGRREGGGYGGGDGGSYGGGGGGW

SEQ ID NO: 108621 - protein, 169 aa, Arabidopsis thaliana; identical to SEQ ID NO: 22059
  peptide (1)..(169): Ceres Seq. ID no. 13667943

SEQ ID NO: 108622 - protein, 110 aa, Arabidopsis thaliana; identical to SEQ ID NO: 22060
  peptide (1)..(110): Ceres Seq. ID no. 13667944

SEQ ID NO: 108623 - DNA, 747 bp, Arabidopsis thaliana
  misc_feature (1)..(747): Ceres Seq. ID no. 13667945
  misc_feature (1)..(747): Ortholog of  Ceres SEQ ID NO 15176321 as cited in SEQ ID NO 52814
  misc_feature (1)..(747): Ortholog of  Ceres SEQ ID NO 12563124 as cited in SEQ ID NO 57104
  misc_feature (1)..(747): Ortholog of  Ceres SEQ ID NO 13598373 as cited in SEQ ID NO 62185
  misc_feature (1)..(747): Ortholog of  Ceres SEQ ID NO 12584664 as cited in SEQ ID NO 62232
  misc_feature (1)..(747): Ortholog of  Ceres SEQ ID NO 12617639 as cited in SEQ ID NO 65219
atcaccgcgctaatcccttagatcttcttttcaaatttcaatggcgtccggtgatgttgagtatcggtgcttcgttggaggtctagcatgggccactgatgacagagctcttgagactgccttcgctcaatacggcgacgttattgattccaagatcattaacgatcgtgagactggaagatcaaggggattcggattcgtcaccttcaaggatgagaaagccatgaaggatgcgattgagggaatgaacggacaagatctcgatggccgtagcatcactgttaacgaggctcagtcacgaggaagcggtggcggcggaggccaccgtggaggtggtggcggtggataccgcagcggcggtggtggaggttactccggtggaggtggtagctacggaggtggcggcggtagacgcgagggtggaggaggatacagcggcggcggcggcggttactcctcaagaggtggtggtggcggaagctacggtggtggaagacgtgagggaggaggaggatacggtggtggtgaaggaggaggttacggaggaagcggtggtggtggaggatggtaattcctttaattaggtttgggattaccaatgaatgttctctctctcgcttgttatgcttctacttggttttgtgtgttctctattttgttctggttctgctttagatttgatgtaacagttcgtgattaggtattttggtatctggaaacgtaatgttaagtcacaagtcattctct

SEQ ID NO: 108624 - protein, 176 aa, Arabidopsis thaliana; identical to SEQ ID NO: 76877
  peptide (1)..(176): Ceres Seq. ID no. 13667946

SEQ ID NO: 108625 - protein, 115 aa, Arabidopsis thaliana; identical to SEQ ID NO: 76878
  peptide (1)..(115): Ceres Seq. ID no. 13667947

SEQ ID NO: 108626 - protein, 108 aa, Arabidopsis thaliana; identical to SEQ ID NO: 76879
  peptide (1)..(108): Ceres Seq. ID no. 13667948

SEQ ID NO: 108627 - DNA, 823 bp, Arabidopsis thaliana
  misc_feature (1)..(823): Ceres Seq. ID no. 13667949
  misc_feature (1)..(823): Ortholog of  Ceres SEQ ID NO 14316176 as cited in SEQ ID NO 57814
  misc_feature (1)..(823): Ortholog of  Ceres SEQ ID NO 13660037 as cited in SEQ ID NO 66990
ctcgtgcattgtagagtgagattctaaagagagagagagagagagatatggctagtggaatcgctcgtggtcgtttagctgaagagaggaaatcgtggaggaagaatcatcctcatggttttgtggcaaagccggagacggggcaggatggaactgtgaatctaatggtgtggcattgcactatacctggtaaagctgggactgattgggaaggtggattctttccattaacgatgcacttcagtgaggattatccgagcaaacctccgaaatgtaaatttccacaagggtttttccaccctaatgtctatccatctggaactgtctgtctctctatccttaacgaggattatggatggagaccagccatcaccgtgaagcagattcttgttggtattcaggatttacttgacacaccgaatcccgctgaccctgcacagacagatggttatcatctcttctgtcaggatccagttgagtacaagaaaagggtgaagctgcagtccaagcagtatcctgctcttgtctaaaacctcaaaaaagagaacgcaccaaaactgatgacaagctctgaatattttctcgtcttgtgtcattatgtttagatgtcattgggtgattgaaaactcctcattttggcaccttaagacactggaatctatttattttcgaaaaaaaactcttctttctctatttaactgttaatattcttggtactgattcagttggtgttgcttctatataatacataattatgttctctggtcgttcatgagtgttgtccaaattctactaagtgaaatatgaagtcttcattccatag

SEQ ID NO: 108628 - protein, 160 aa, Arabidopsis thaliana; identical to SEQ ID NO: 35742
  peptide (1)..(160): Ceres Seq. ID no. 13667950

SEQ ID NO: 108629 - protein, 121 aa, Arabidopsis thaliana; identical to SEQ ID NO: 35743
  peptide (1)..(121): Ceres Seq. ID no. 13667951

SEQ ID NO: 108630 - protein, 98 aa, Arabidopsis thaliana; identical to SEQ ID NO: 35744
  peptide (1)..(98): Ceres Seq. ID no. 13667952

SEQ ID NO: 108631 - DNA, 1948 bp, Arabidopsis thaliana
  misc_feature (1)..(1948): Ceres Seq. ID no. 13667957
  misc_feature (1)..(1948): Ortholog of  Ceres SEQ ID NO 13594037 as cited in SEQ ID NO 55666
  misc_feature (1)..(1948): Ortholog of  Ceres SEQ ID NO 13657707 as cited in SEQ ID NO 66407
gccacgagaataatcccaaaaaccagaaaaaaaggagctttgcttttgtaggaattaatggattcagtgaactccttcaaaggatatggaaaagtagacgaagctcaagatttagcattgaagaaaaagacaagaaaacgtctacttctactatccatctccgtcgtagttctcatcgccgtaataatcgccgccgtagtcgccaccgtcgttcacaagaacaaaaacgagtcaacaccgagtccacctcccgagttaacaccatccacttcactcaaagccatttgcagtgtaactcgtttccctgaatcttgcatttcaagtatctcaaagcttccatcttccaacacaacagatccagagactctattcaagctctcattgaaagtaatcatcgatgagcttgattcgatttccgatttaccggagaagctatcgaaagagactgaagacgaaagaatcaaatctgcgttaagggtttgtggagatctgatcgaagatgctttagatcgactcaacgacactgtttccgccattgatgacgaagaaaagaagaaaactttgtcatcttccaaaatcgaagatctcaaaacttggctaagcgcaacggtaacagatcacgagacgtgtttcgattcgttagatgagttgaaacagaacaaaacagagtatgcgaactcgacgattactcagaatctgaaatcggcaatgagtagatcaacggagttcacaagtaacagtcttgcaatagtatcgaagattctttctgcgttaagcgatttggggattccgatacacaggagaagaagactgatgagtcatcatcatcagcaaagtgtggattttgagaaatgggcacgacggaggttgttgcaaacggcaggtttaaagcctgatgtgacggtggcgggtgatggaaccggtgatgtgttgactgtgaatgaagcggtggctaaggtgccgaagaagagtttgaagatgtttgtgatttatgtgaagagtggaacttatgttgagaatgttgtgatggataagagtaaatggaacgttatgatttacggtgacggcaaagggaagaccattatttccggcagcaagaacttcgtcgacgggactcctacttacgaaacggcgacgtttgctatacaaggcaaaggatttataatgaaggatattggaatcataaacaccgcgggagcagcaaaacaccaagctgtggcattccgatcaggctctgatttctcagtctattaccaatgctcattcgatggttttcaagacactctttaccctcactccaaccgccaattctaccgtgactgcgacgttactgggacaatcgacttcattttcggaagtgctgcggtcgttttccaaggctgcaaaatcatgcctcgccagcctctttctaaccaattcaacaccataaccgctcagggcaaaaaagatccgaaccaaagctcggggatgtcgattcaacgatgcactatctccgcaaacggcaatgtgattgctcccacgtatcttggccggccgtggaaggagttttccacgacggttattatggagacggtgattggagcagtggttcgaccgtccgggtggatgtcatgggtttctggagttgatccaccagcaagtattgtctacggagagtataagaatacgggcccgggttcagatgtaacgcagagagttaaatgggctggatataaaccggttatgtcggacgccgaggctgcgaagtttacagtggctacgcttttacacggagctgattggataccggcaacaggagtgatcaatcagctatcttaatatagtgacaatacaattggattcgtagcttgtttttgaaaacatccggttgtgatctactttatatttgtttgacacttatgcatgatctgtaattttttccaacatagttgtattttgtgtatcccct

SEQ ID NO: 108632 - protein, 586 aa, Arabidopsis thaliana; identical to SEQ ID NO: 37485
  peptide (1)..(586): Ceres Seq. ID no. 13667958

SEQ ID NO: 108633 - protein, 369 aa, Arabidopsis thaliana; identical to SEQ ID NO: 37486
  peptide (1)..(369): Ceres Seq. ID no. 13667959

SEQ ID NO: 108634 - protein, 334 aa, Arabidopsis thaliana; identical to SEQ ID NO: 37487
  peptide (1)..(334): Ceres Seq. ID no. 13667960

SEQ ID NO: 108635 - DNA, 1847 bp, Arabidopsis thaliana
  misc_feature (1)..(1847): Ceres Seq. ID no. 13667977
  misc_feature (1)..(1847): Ortholog of  Ceres SEQ ID NO 14313714 as cited in SEQ ID NO 54084
agtaatttagcttcattctctctctctctctctcacaattactgatcggttctgaaatttgtagctatgcaggcaacggctttatcatctgggttcaatcctctaacgaaacgtaaagatcacagatttcccaggtcatgctctcagagaaattctctgtctttgattcaatgcgatataaaagagagatctttcggagagtctatgacgatcacgaatcgtggattgagttttaagacgaatgtgtttgagcaagctcgttctgtgactggagactgttcttatgatgaaacttcagcaaaagcacgttctcatgttgttgcagaagataagattggtgtcttgcttttgaatttaggtggtcctgaaactcttaacgatgttcaacctttcttgtataatctctttgctgatccggatattataaggcttcctagaccatttcagtttcttcaagggactatagctaagtttatatctgttgttcgtgctccgaaatctaaagaagggtatgctgctattggtggtggctctcctttgcgtaaaataactgatgagcaagcggatgctattaagatgtctttgcaagcgaagaacattgctgctaatgtctatgttggtatgcggtattggtatccgttcactgaggaggctgttcagcagataaagaaggacaaaattactagacttgttgtactgccattgtatcctcagtattctatctctacaacgggttcaagcatacgcgttctccaagatttattcaggaaagatccgtacctagctggagtgccggtagctattataaagtcctggtaccaaaggcgaggctatgtcaattctatggctgacctcattgagaaggagcttcaaactttctctgatcctaaggaggttatgatattcttcagtgcccatggtgttccggtcagctacgtagagaatgctggagatccgtaccagaagcagatggaagagtgtattgacttgataatggaagagctaaaagccagaggggttcttaacgaccataaattggcataccagagtcgtgttggccctgttcaatggctgaagccatacaccgatgaggttcttgtcgaccttggtaagagtggtgttaagagtctactagccgttccagtcagtttcgtgagtgagcacattgagacacttgaggagatagacatggagtatagggaattagctcttgagtcaggggtagagaactggggacgggtacccgcgctaggtctcacaccatccttcatcaccgacttagctgatgcagtgatagaatcacttccttcagcagaagcaatgtcaaacccaaatgcagtggttgactcagaagatagcgagtcgtcagatgctttcagttacattgtcaagatgttcttcggttcgattctggctttcgtcctacttctctccccaaagatgttccatgcgttccggaacctatagaatctcgttggttttgtgttaagtcttttcttggagaaatgtcttggttaaattcaatatatatagtccaatctattgaagtactagtacaccagctctaataagctgatgtgggtaagtagttcaatagattggactatgtatattaaatttgactaagagataaactagagaatgggataaagatgagaacggtattagaaagttctttgaggaaatttagatgtattttaaattgaagatgcatttagctataaacatagtggctacgttcctcttagagatgaggagagaattatattctattattatttggtttcttttcttcgtttttgtatggtttcaatacttaattgtcaaaagtatcctataattttgtt

SEQ ID NO: 108636 - protein, 466 aa, Arabidopsis thaliana
  peptide (1)..(466): Ceres Seq. ID no. 13667978
MQATALSSGFNPLTKRKDHRFPRSCSQRNSLSLIQCDIKERSFGESMTITNRGLSFKTNVFEQARSVTGDCSYDETSAKARSHVVAEDKIGVLLLNLGGPETLNDVQPFLYNLFADPDIIRLPRPFQFLQGTIAKFISVVRAPKSKEGYAAIGGGSPLRKITDEQADAIKMSLQAKNIAANVYVGMRYWYPFTEEAVQQIKKDKITRLVVLPLYPQYSISTTGSSIRVLQDLFRKDPYLAGVPVAIIKSWYQRRGYVNSMADLIEKELQTFSDPKEVMIFFSAHGVPVSYVENAGDPYQKQMEECIDLIMEELKARGVLNDHKLAYQSRVGPVQWLKPYTDEVLVDLGKSGVKSLLAVPVSFVSEHIETLEEIDMEYRELALESGVENWGRVPALGLTPSFITDLADAVIESLPSAEAMSNPNAVVDSEDSESSDAFSYIVKMFFGSILAFVLLLSPKMFHAFRNL

SEQ ID NO: 108637 - protein, 420 aa, Arabidopsis thaliana
  peptide (1)..(420): Ceres Seq. ID no. 13667979
MTITNRGLSFKTNVFEQARSVTGDCSYDETSAKARSHVVAEDKIGVLLLNLGGPETLNDVQPFLYNLFADPDIIRLPRPFQFLQGTIAKFISVVRAPKSKEGYAAIGGGSPLRKITDEQADAIKMSLQAKNIAANVYVGMRYWYPFTEEAVQQIKKDKITRLVVLPLYPQYSISTTGSSIRVLQDLFRKDPYLAGVPVAIIKSWYQRRGYVNSMADLIEKELQTFSDPKEVMIFFSAHGVPVSYVENAGDPYQKQMEECIDLIMEELKARGVLNDHKLAYQSRVGPVQWLKPYTDEVLVDLGKSGVKSLLAVPVSFVSEHIETLEEIDMEYRELALESGVENWGRVPALGLTPSFITDLADAVIESLPSAEAMSNPNAVVDSEDSESSDAFSYIVKMFFGSILAFVLLLSPKMFHAFRNL

SEQ ID NO: 108638 - protein, 296 aa, Arabidopsis thaliana
  peptide (1)..(296): Ceres Seq. ID no. 13667980
MSLQAKNIAANVYVGMRYWYPFTEEAVQQIKKDKITRLVVLPLYPQYSISTTGSSIRVLQDLFRKDPYLAGVPVAIIKSWYQRRGYVNSMADLIEKELQTFSDPKEVMIFFSAHGVPVSYVENAGDPYQKQMEECIDLIMEELKARGVLNDHKLAYQSRVGPVQWLKPYTDEVLVDLGKSGVKSLLAVPVSFVSEHIETLEEIDMEYRELALESGVENWGRVPALGLTPSFITDLADAVIESLPSAEAMSNPNAVVDSEDSESSDAFSYIVKMFFGSILAFVLLLSPKMFHAFRNL

SEQ ID NO: 108639 - DNA, 1535 bp, Arabidopsis thaliana
  misc_feature (1)..(1535): Ceres Seq. ID no. 13667985
  misc_feature (1)..(1535): Ortholog of  Ceres SEQ ID NO 14305026 as cited in SEQ ID NO 52980
  misc_feature (1)..(1535): Ortholog of  Ceres SEQ ID NO 13595598 as cited in SEQ ID NO 56822
  misc_feature (1)..(1535): Ortholog of  Ceres SEQ ID NO 13655712 as cited in SEQ ID NO 63394
ccgggattccgggaaaataataatacgacttttgaaatctctcactaatatttcccaagaaaacctgatgaattaaaagttcatattttcttggtgttgattggtattagatgactatttcttagtattagtcaattctctgtttccatcttatatggatagtctagacacagagcaaagatccttctttggagaaaaagaagatgagagacgagagaggatcgtttcttcacgtattggtcgtagatagatcttaatcgataaccatctaggccttgatctaaccattcaatataaactttatttccttcttcttttcgatctcaattgttccgaccaaacaagatgaagagatcacgtggaagctccgattctttatccggtttcttaccaattcgccattctacaacagacaaacaaataagcccaagaccaacaactaccggctttctctattccggcgccggagactactcccagatgtttgacgcattagaagacgacggaagtctagaggacctcggcggcgttggacacgcgtcttctacggcggcggagaaaaaacggcggttgggtgtagagcaagtgaaagcgttagagaagaatttcgagattgataacaagttagagccagagaggaaagtgaagctggctcaagagcttgggttgcagccacgccaagtcgcgatctggtttcaaaaccgccgtgctcggtggaagacaaagcagcttgaacgtgattacggcgttcttaagtcaaactttgatgcactcaaacgcaaccgcgactcgcttcaacgcgataacgattcactccttggacagattaaagagctgaaagcaaaacttaacgtggaaggggttaaaggtatagaagagaacggcgctttaaaagcagtggaagcaaatcaatcggtgatggctaataatgaagtcttagagctaagccaccgttctccatcgccaccaccgcatattcctacggacgctccgacatcggagctcgcattcgaaatgtttagcatttttccacgcacggaaaacttcagagacgatcctgccgatagcagcgactcaagcgcggttttgaacgaagagtatagtcccaatacggttgaagcagctggcgcagtggcggccacgactgtagaaatgtcgacgatgggttgttttagccaattcgtgaaaatggaagagcatgaagatctgtttagtggagaggaagcttgcaagttgtttgcggacaatgagcaatggtattgctccgatcagtggaattcgtaaaatgtgggggcagaattaaaagcatagaaaagctgaagggggtatgtggaaatattactgaagtcatattgggtcggaaaatgcattactcaaaatattggggtttttcttgagaaaatggaatatgacgcgagagggtagtaaaaacgagcgtgtggcgttccatgcacgtgtggccgtaatcttttcaaggttgaatgagagaggacaaaaaagtctgaaatcatcgggaataaaaaaaatatgtgacg

SEQ ID NO: 108640 - protein, 312 aa, Arabidopsis thaliana; identical to SEQ ID NO: 40748
  peptide (1)..(312): Ceres Seq. ID no. 13667986

SEQ ID NO: 108641 - protein, 267 aa, Arabidopsis thaliana; identical to SEQ ID NO: 40749
  peptide (1)..(267): Ceres Seq. ID no. 13667987

SEQ ID NO: 108642 - DNA, 2209 bp, Arabidopsis thaliana
  misc_feature (1)..(2209): Ceres Seq. ID no. 13667992
  misc_feature (1)..(2209): Ortholog of  Ceres SEQ ID NO 14303276 as cited in SEQ ID NO 1264
  misc_feature (1)..(2209): Ortholog of  Ceres SEQ ID NO 15170536 as cited in SEQ ID NO 52791
  misc_feature (1)..(2209): Ortholog of  Ceres SEQ ID NO 15171813 as cited in SEQ ID NO 57309
  misc_feature (1)..(2209): Ortholog of  Ceres SEQ ID NO 14314378 as cited in SEQ ID NO 57601
  misc_feature (1)..(2209): Ortholog of  Ceres SEQ ID NO 12465083 as cited in SEQ ID NO 68239
tcttcttcgttctctagttttttcctcagtctctgttcttagatcccttgtagtttccaaatcttccgataaaaatgtcgggtaaaggagaaggaccagctatcggtatcgatcttggtaccacttactcttgcgtcggagtatggcaacacgaccgtgttgagatcattgctaatgatcaaggaaacagaaccacgccatcttacgttgctttcaccgactccgagaggttgatcggtgacgcagctaagaatcaggtcgccatgaaccccgttaacaccgttttcgacgctaagaggttgatcggtcgtcgtttctctgacagctctgttcagagtgacatgaaattgtggccattcaagattcaagccggacctgccgataagccaatgatctacgtcgaatacaagggtgaagagaaagagttcgcagctgaggagatttcttccatggttcttattaagatgcgtgagattgctgaggcttaccttggtgtcacaatcaagaacgccgttgttaccgttccagcttacttcaacgactctcagcgtcaggctacaaaggatgctggtgtcatcgctggtttgaacgttatgcgaatcatcaacgagcctacagccgccgctattgcctacggtcttgacaaaaaggctaccacagttggagagaagaatgttcttatcttcgatcttggtggtggcacttttgatgtctctcttcttaccattgaagagggtatctttgaggtgaaggcaactgctggtgacacccatcttggtggggaagattttgacaacagaatggttaaccactttgtccaagagttcaagaggaagagtaagaaggatatcaccggtaacccaagagctcttaggaggttgagaacttcctgtgagagagcgaagaggactctttcttccactgctcagaccaccatcgagattgactctctatacgagggtatcgacttctactccaccatcacccgtgctagatttgaggagctcaacatggatctcttcaggaagtgtatggagccagttgagaagtgtcttcgtgatgctaagatggacaagagcactgttcatgatgttgtccttgttggtggttctacccgtatccctaaggttcagcaattgctccaggacttcttcaacggcaaagagctttgcaagtctattaaccctgatgaggctgttgcctacggtgctgctgtccagggagctattctcagcggtgaaggaaacgagaaggttcaagatcttctattgctcgatgtcactcctctctcccttggtttggaaactgccggtggtgtcatgaccactttgatcccaaggaacacaaccatcccaaccaagaaggaacaagtcttctccacctactcagacaaccaacccggtgtgttgatccaggtgtacgaaggagagagagccagaaccaaggacaacaaccttcttggtaaatttgagctctccggaattcctccagctcctcgtggtgtcccccagatcacagtctgctttgacattgatgccaatggtatcctcaatgtctctgctgaggacaagaccaccggacagaagaacaagatcaccatcaccaatgacaagggtcgtctctccaaggatgagattgagaagatggttcaagaggctgagaagtacaagtccgaagacgaggagcacaagaagaaggttgaagccaagaacgctctcgagaactacgcttacaacatgaggaacaccatccaagacgagaagattggtgagaagctcccggctgcagacaagaagaagatcgaggattctattgagcaggcgattcaatggctcgagggtaaccagttggctgaggctgatgagttcgaagacaagatgaaggaattggagagcatctgcaacccaatcattgccaagatgtaccaaggagctggtggtgaagccggtggtccaggtgcctctggtatggacgatgatgctccccctgcttcaggcggtgctggacctaagatcgaggaggtcgactaatttgttggacattgacctctctctttctcctatctctatctcttttacttgcttttttttgatctgttaagactttttatgttgggcttttttaaagaagcccattttgtggtgttttttggttagtactattttgaacaatggttggttctataccagtttagctacgatgacgccgg

SEQ ID NO: 108643 - protein, 651 aa, Arabidopsis thaliana
  peptide (1)..(651): Ceres Seq. ID no. 13667993
MSGKGEGPAIGIDLGTTYSCVGVWQHDRVEIIANDQGNRTTPSYVAFTDSERLIGDAAKNQVAMNPVNTVFDAKRLIGRRFSDSSVQSDMKLWPFKIQAGPADKPMIYVEYKGEEKEFAAEEISSMVLIKMREIAEAYLGVTIKNAVVTVPAYFNDSQRQATKDAGVIAGLNVMRIINEPTAAAIAYGLDKKATTVGEKNVLIFDLGGGTFDVSLLTIEEGIFEVKATAGDTHLGGEDFDNRMVNHFVQEFKRKSKKDITGNPRALRRLRTSCERAKRTLSSTAQTTIEIDSLYEGIDFYSTITRARFEELNMDLFRKCMEPVEKCLRDAKMDKSTVHDVVLVGGSTRIPKVQQLLQDFFNGKELCKSINPDEAVAYGAAVQGAILSGEGNEKVQDLLLLDVTPLSLGLETAGGVMTTLIPRNTTIPTKKEQVFSTYSDNQPGVLIQVYEGERARTKDNNLLGKFELSGIPPAPRGVPQITVCFDIDANGILNVSAEDKTTGQKNKITITNDKGRLSKDEIEKMVQEAEKYKSEDEEHKKKVEAKNALENYAYNMRNTIQDEKIGEKLPAADKKKIEDSIEQAIQWLEGNQLAEADEFEDKMKELESICNPIIAKMYQGAGGEAGGPGASGMDDDAPPASGGAGPKIEEVD

SEQ ID NO: 108644 - protein, 588 aa, Arabidopsis thaliana
  peptide (1)..(588): Ceres Seq. ID no. 13667994
MNPVNTVFDAKRLIGRRFSDSSVQSDMKLWPFKIQAGPADKPMIYVEYKGEEKEFAAEEISSMVLIKMREIAEAYLGVTIKNAVVTVPAYFNDSQRQATKDAGVIAGLNVMRIINEPTAAAIAYGLDKKATTVGEKNVLIFDLGGGTFDVSLLTIEEGIFEVKATAGDTHLGGEDFDNRMVNHFVQEFKRKSKKDITGNPRALRRLRTSCERAKRTLSSTAQTTIEIDSLYEGIDFYSTITRARFEELNMDLFRKCMEPVEKCLRDAKMDKSTVHDVVLVGGSTRIPKVQQLLQDFFNGKELCKSINPDEAVAYGAAVQGAILSGEGNEKVQDLLLLDVTPLSLGLETAGGVMTTLIPRNTTIPTKKEQVFSTYSDNQPGVLIQVYEGERARTKDNNLLGKFELSGIPPAPRGVPQITVCFDIDANGILNVSAEDKTTGQKNKITITNDKGRLSKDEIEKMVQEAEKYKSEDEEHKKKVEAKNALENYAYNMRNTIQDEKIGEKLPAADKKKIEDSIEQAIQWLEGNQLAEADEFEDKMKELESICNPIIAKMYQGAGGEAGGPGASGMDDDAPPASGGAGPKIEEVD

SEQ ID NO: 108645 - protein, 562 aa, Arabidopsis thaliana
  peptide (1)..(562): Ceres Seq. ID no. 13667995
MKLWPFKIQAGPADKPMIYVEYKGEEKEFAAEEISSMVLIKMREIAEAYLGVTIKNAVVTVPAYFNDSQRQATKDAGVIAGLNVMRIINEPTAAAIAYGLDKKATTVGEKNVLIFDLGGGTFDVSLLTIEEGIFEVKATAGDTHLGGEDFDNRMVNHFVQEFKRKSKKDITGNPRALRRLRTSCERAKRTLSSTAQTTIEIDSLYEGIDFYSTITRARFEELNMDLFRKCMEPVEKCLRDAKMDKSTVHDVVLVGGSTRIPKVQQLLQDFFNGKELCKSINPDEAVAYGAAVQGAILSGEGNEKVQDLLLLDVTPLSLGLETAGGVMTTLIPRNTTIPTKKEQVFSTYSDNQPGVLIQVYEGERARTKDNNLLGKFELSGIPPAPRGVPQITVCFDIDANGILNVSAEDKTTGQKNKITITNDKGRLSKDEIEKMVQEAEKYKSEDEEHKKKVEAKNALENYAYNMRNTIQDEKIGEKLPAADKKKIEDSIEQAIQWLEGNQLAEADEFEDKMKELESICNPIIAKMYQGAGGEAGGPGASGMDDDAPPASGGAGPKIEEVD

SEQ ID NO: 108646 - DNA, 528 bp, Arabidopsis thaliana
  misc_feature (1)..(528): Ceres Seq. ID no. 13667996
  misc_feature (1)..(528): Ortholog of  Ceres SEQ ID NO 15172828 as cited in SEQ ID NO 60174
ggcacgagaaacaaaactcttaaaagcttaagaacaaataataaaaatggccggtgaaggagaagtgattgcttgccataccctcgaagtttggaacgagaaggtcaaagacgccaatgaatccaagaaactgattgtgatagacttcacagcatcatggtgtccaccttgccgtttcattgcaccagtgtttgcagagatggctaagaagttcactaatgttgtcttcttcaagatcgatgttgatgaattgcaagctgttgctcaggaattcaaagttgaggcaatgcctacttttgttttcatgaaagaaggcaacatcattgatcgtgttgtcggtgctgcgaaagatgagatcaatgagaagctgatgaagcatggtggtcttgtagcttctgcttgattgatttcagtttctaactctttgcatcataataaagtttttatctttcgtatgaaataaaagtgatgcattgctactgcacatttgtattataactatgttgatttttcgattactggtttgtt

SEQ ID NO: 108647 - protein, 118 aa, Arabidopsis thaliana; identical to SEQ ID NO: 26633
  peptide (1)..(118): Ceres Seq. ID no. 13667997

SEQ ID NO: 108648 - protein, 67 aa, Arabidopsis thaliana; identical to SEQ ID NO: 26634
  peptide (1)..(67): Ceres Seq. ID no. 13667998

SEQ ID NO: 108649 - DNA, 1208 bp, Arabidopsis thaliana
  misc_feature (1)..(1208): Ceres Seq. ID no. 13668003
  misc_feature (1)..(1208): Ortholog of  Ceres SEQ ID NO 15169655 as cited in SEQ ID NO 64922
  misc_feature (1)..(1208): Ortholog of  Ceres SEQ ID NO 13596004 as cited in SEQ ID NO 68212
ggtacgagcttaatccgccgtctctcactttttcgccggcgtggttagatcgtacaaagctcagagagaatgttgggaatcttgaggcaaagagccatcgatggagcttcgactcttaggaggacgcgattcgcattggtttctgctaggagctatgcagctggtgcaaaagagatgacagtcagagatgctctaaattctgcaattgatgaggaaatgtctgctgatcctaaagtatttgtcatgggtgaagaggttggccaatatcaaggtgcctacaagatcactaaaggccttttggagaaatatggtcctgagagagtttacgatacccctattactgaggctggatttactggaattggagttggtgctgcctatgctggcttaaagcccgttgtagaatttatgacgtttaacttctctatgcaggcaattgatcatatcatcaattccgctgcaaagtcaaattacatgtctgctggacagataaatgtacccatcgtctttagaggacccaatggtgctgctgctggtgttggagctcaacattctcagtgctatgcagcgtggtatgcctcagttcctggtttgaaagtccttgctccgtattcagctgaagatgctcgtggtcttcttaaagctgccattagagaccctgaccctgttgtcttccttgaaaacgagttactatatggtgaatcattccctatttcagaagaagcccttgattcaagtttctgtcttcccataggcaaagccaagattgaacgagaaggaaaggacgtaacgatagtaactttctcgaagatggtcggtttcgccctcaaggcagctgagaagctcgcagaagagggaataagtgctgaggtaataaatcttcgatcaatccgtccgcttgaccgagccaccatcaatgcttcagtgaggaaaacgagtagattggtaacagttgaagaaggtttcccacaacatggagtctgtgcagaaatttgtgcgtcggttgtagaagagagcttttcgtacttggatgcaccggtcgagaggattgcaggagctgatgttccaatcccgtatacagctaacctagagagattggctcttcctcagatagaggacatcgttcgtgcatcaaagagagcttgttacagatcgaaataaaatcgtcaacatcaacacatttcttctttgatctttaaagggaaagg

SEQ ID NO: 108650 - protein, 363 aa, Arabidopsis thaliana
  peptide (1)..(363): Ceres Seq. ID no. 13668004
MLGILRQRAIDGASTLRRTRFALVSARSYAAGAKEMTVRDALNSAIDEEMSADPKVFVMGEEVGQYQGAYKITKGLLEKYGPERVYDTPITEAGFTGIGVGAAYAGLKPVVEFMTFNFSMQAIDHIINSAAKSNYMSAGQINVPIVFRGPNGAAAGVGAQHSQCYAAWYASVPGLKVLAPYSAEDARGLLKAAIRDPDPVVFLENELLYGESFPISEEALDSSFCLPIGKAKIEREGKDVTIVTFSKMVGFALKAAEKLAEEGISAEVINLRSIRPLDRATINASVRKTSRLVTVEEGFPQHGVCAEICASVVEESFSYLDAPVERIAGADVPIPYTANLERLALPQIEDIVRASKRACYRSK

SEQ ID NO: 108651 - protein, 328 aa, Arabidopsis thaliana
  peptide (1)..(328): Ceres Seq. ID no. 13668005
MTVRDALNSAIDEEMSADPKVFVMGEEVGQYQGAYKITKGLLEKYGPERVYDTPITEAGFTGIGVGAAYAGLKPVVEFMTFNFSMQAIDHIINSAAKSNYMSAGQINVPIVFRGPNGAAAGVGAQHSQCYAAWYASVPGLKVLAPYSAEDARGLLKAAIRDPDPVVFLENELLYGESFPISEEALDSSFCLPIGKAKIEREGKDVTIVTFSKMVGFALKAAEKLAEEGISAEVINLRSIRPLDRATINASVRKTSRLVTVEEGFPQHGVCAEICASVVEESFSYLDAPVERIAGADVPIPYTANLERLALPQIEDIVRASKRACYRSK

SEQ ID NO: 108652 - protein, 314 aa, Arabidopsis thaliana
  peptide (1)..(314): Ceres Seq. ID no. 13668006
MSADPKVFVMGEEVGQYQGAYKITKGLLEKYGPERVYDTPITEAGFTGIGVGAAYAGLKPVVEFMTFNFSMQAIDHIINSAAKSNYMSAGQINVPIVFRGPNGAAAGVGAQHSQCYAAWYASVPGLKVLAPYSAEDARGLLKAAIRDPDPVVFLENELLYGESFPISEEALDSSFCLPIGKAKIEREGKDVTIVTFSKMVGFALKAAEKLAEEGISAEVINLRSIRPLDRATINASVRKTSRLVTVEEGFPQHGVCAEICASVVEESFSYLDAPVERIAGADVPIPYTANLERLALPQIEDIVRASKRACYRSK

SEQ ID NO: 108653 - DNA, 1050 bp, Arabidopsis thaliana
  misc_feature (1)..(1050): Ceres Seq. ID no. 13668011
  misc_feature (1)..(1050): Ortholog of  Ceres SEQ ID NO 14303417 as cited in SEQ ID NO 54923
  misc_feature (1)..(1050): Ortholog of  Ceres SEQ ID NO 12635513 as cited in SEQ ID NO 0
  misc_feature (1)..(1050): Ortholog of  Ceres SEQ ID NO 15179044 as cited in SEQ ID NO 0
cttgattccaatccattcttcttcaagtgccgggttctcgggtcggatcttctaagtctagctagggataatggctactgtcactactcatgcctcggcctcgattttccgaccttgtacttcaaagccaagattcctcaccggttcttccggtaggttgaaccgcgacttgtcgtttacatcgatcggttcatcggccaaaacgtcgtcgttcaaggttgaagctaagaaaggagaatggttgcccggtttggcatcgcctgattatctcaccggcagtcttgccggtgacaatgggtttgacccgttgggtctagcagaggatccagagaacttgaaatggttcgtccaggcagagctggtcaacggacgatgggctatgctcggtgtcgctgggatgcttttgccggaagttttcaccaagatcggaatcataaatgttcctgagtggtacgatgctgggaaagagcagtattttgcatcgtcgtcgacattgttcgtgatcgagttcatattgtttcattacgttgagatcagacggtggcaagacatcaagaacccaggaagtgtgaaccaagaccctatctttaagcaatacagcttacctaagggtgaagttggttaccctggtggaatctttaacccgcttaactttgctcctacgcaagaggccaaggagaaagagctagcaaacgggaggttggcgatgttggcattcttagggtttgtggttcaacacaatgtgactggaaaaggaccatttgagaatctgttgcagcacttgtctgacccatggcacaacactattgtccaaaccttcaactaaagagtgaagacagacttatgatctcatacctatctatcttccatcactttcatgtctgtctgtgagtgtgtttcatcttagagttcttggtttttgagcttgaattattgttgaaccgttgtagctccatgaacaaatttggaatcttcaatgtacagaggaactaagttaatcaacattgttgtactctttaatatctattattcatgtggcaacagttatat

SEQ ID NO: 108654 - protein, 251 aa, Arabidopsis thaliana; identical to SEQ ID NO: 26326
  peptide (1)..(251): Ceres Seq. ID no. 13668012

SEQ ID NO: 108655 - protein, 148 aa, Arabidopsis thaliana; identical to SEQ ID NO: 26327
  peptide (1)..(148): Ceres Seq. ID no. 13668013

SEQ ID NO: 108656 - protein, 142 aa, Arabidopsis thaliana; identical to SEQ ID NO: 26328
  peptide (1)..(142): Ceres Seq. ID no. 13668014

SEQ ID NO: 108657 - DNA, 963 bp, Arabidopsis thaliana
  misc_feature (1)..(963): Ceres Seq. ID no. 13668015
  misc_feature (1)..(963): Ortholog of  Ceres SEQ ID NO 13581804 as cited in SEQ ID NO 51424
  misc_feature (1)..(963): Ortholog of  Ceres SEQ ID NO 14310890 as cited in SEQ ID NO 54290
  misc_feature (1)..(963): Ortholog of  Ceres SEQ ID NO 13663874 as cited in SEQ ID NO 67003
gaattcatcttcccatcctcacttctctttctttctgatcataattaatcttgctaagccagctagggcttatagaaatggagggtggtgcgagtaatgaagtagcagagagcagcaagaagatagggagagggaagatagagataaagaggatagagaacactacgaatcgtcaagtcactttctgcaaacgacgcaatggtttactcaagaaagcttatgagctctctgtcttgtgtgacgctgaggttgctcttgtcatcttctccactcgaggccgtctctacgagtacgccaacaacagtgtgagaggaacaatagaaaggtacaagaaagcttgctccgacgccgttaaccctccgaccatcaccgaagctaatactcagtactatcagcaagaggcgtctaaactccggagacagattcgggacattcagaatttgaacagacacattcttggtgaatctcttggttccttgaactttaaggaactcaagaaccttgaaagtaggcttgagaaaggaatcagtcgtgtccgatccaagaagcacgagatgttagttgcagagattgaatacatgcaaaaaagggaaatcgagctgcaaaacgataacatgtatctccgctccaagattactgaaagaacaggtctacagcaacaagaatcgagtgtgatacatcaagggacagtttacgagtcgggtgttacttcttctcaccagtcggggcagtataaccggaattatattgcggttaaccttcttgaaccgaatcagaattcctccaaccaagaccaaccacctctgcaacttgtttgattcagtctaacataagcttctttcctcagcctgagatcgatctatagtgtcacctaaatgcggccgcgtccctcaacatctagtcgcaagctgaggggaaccactagtgtcatacgaacctccaagagacggttacacaaacggg

SEQ ID NO: 108658 - protein, 246 aa, Arabidopsis thaliana; identical to SEQ ID NO: 102048
  peptide (1)..(246): Ceres Seq. ID no. 13668016

SEQ ID NO: 108659 - DNA, 1665 bp, Arabidopsis thaliana
  misc_feature (1)..(1665): Ceres Seq. ID no. 13668024
  misc_feature (1)..(1665): Ortholog of  Ceres SEQ ID NO 14307257 as cited in SEQ ID NO 54628
cttaaaacatttattttatcttcttcttgttctctctttctctttctctcatcactatgaagagtttcaacacagaaggacacaaccactccacggcggaatccggcgatgcctacaccgtgtcggacccgacaaagaacgtcgatgaagatggtcgagagaagcgtaccgggacgtggcttacggcgagtgcgcatattatcacggcggtgataggctccggagtgttgtctttagcatgggctatagctcagcttggttggatcgcagggacatcgatcttactcattttctcgttcattacttacttcacctccaccatgcttgccgattgctaccgtgcgccggatcccgtcaccggaaaacggaattacacttacatggacgttgttcgatcttacctcggtggtaggaaagtgcagctctgtggagtggcacaatatgggaatctgattggggtcactgttggttacaccatcactgcttctattagtttggtagcggtagggaaatcgaactgcttccacgataaagggcacactgcggattgtactatatcgaattatccgtatatggcggtttttggcattattcaggttattcttagccagatcccaaatttccacaagctctcttttctttccattatggccgcggtcatgtcctttacttatgcaactattggaatcggtctagccatcgcaaccgtcgcaggtgggaaagtgggtaagacgagtatgacgggcacagcggttggagtagatgtaaccgcagctcaaaagatatggagatcgtttcaagcggttggggacatagcgttcgcctatgcttatgccacggttctcatcgagattcaggatacactaagatctagcccagctgagaacaaagccatgaaaagagcaagtcttgtgggagtatcaaccaccacttttttctacatcttatgtggatgcatcggctatgctgcatttggaaacaatgcccctggagatttcctcacagatttcgggtttttcgagcccttttggctcattgactttgcaaacgcttgcatcgctgtccaccttattggtgcctatcaggtgttcgcgcagccgatattccagtttgttgagaaaaaatgcaacagaaactatccagacaacaagttcatcacttctgaatattcagtaaacgtacctttccttggaaaattcaacattagcctcttcagattggtgtggaggacagcttatgtggttataaccactgttgtagctatgatattccctttcttcaacgcgatcttaggtcttatcggagcagcttccttctggcctttaacggtttatttccctgtggagatgcacattgcacaaaccaagattaagaagtactctgctagatggattgcgctgaaaacgatgtgctatgtttgcttgatcgtctcgctcttagctgcagccggatccatcgcaggacttataagtagtgtcaaaacctacaagcccttccggactatgcatgagtgagtttgagatcctcaagagagtcaaaaatatatgtagtagtttggtctttctgttaaactatctggtgtctaaatccaatgagaatgctttattgctaaaacttcatgaatctctctgtatctacatctttcaatctaagctacgtcagggc

SEQ ID NO: 108660 - protein, 485 aa, Arabidopsis thaliana; identical to SEQ ID NO: 24657
  peptide (1)..(485): Ceres Seq. ID no. 13668025

SEQ ID NO: 108661 - protein, 397 aa, Arabidopsis thaliana; identical to SEQ ID NO: 24658
  peptide (1)..(397): Ceres Seq. ID no. 13668026

SEQ ID NO: 108662 - protein, 377 aa, Arabidopsis thaliana; identical to SEQ ID NO: 24659
  peptide (1)..(377): Ceres Seq. ID no. 13668027

SEQ ID NO: 108663 - DNA, 924 bp, Arabidopsis thaliana
  misc_feature (1)..(924): Ceres Seq. ID no. 13668028
  misc_feature (1)..(924): Ortholog of  Ceres SEQ ID NO 12563124 as cited in SEQ ID NO 57104
  misc_feature (1)..(924): Ortholog of  Ceres SEQ ID NO 12617639 as cited in SEQ ID NO 65219
tatcgaattcctttcaatggcgtccggtgatgttgagtatcggtgcttgttggaggtctagcatgggccactgatgacagagctcttgagactgccttcgctcaatacggcgacgttattgattccaaggtctgttacacgccgagatcggactccgagtgatatcgatgatctcatcctcgacggatctgttccgatcttgtgtttctctgttacttgattcgattactctgttactattctcgttctttgttactactactactactactgttacttgtattttcccaaatcgtaacgatcgtgagactggaagatcaaggggattcggattcgtcaccttcaaggatgagaaagccatgaaggatgcgattgagggaatgaacggacaagatctcgatggccgtagcatcactgttaacgaggctcagtcacgaggaagcggtggcggcggaggccaccgtggaggtggtggcggtggataccgcagcggcggtggtggaggttactccggtggaggtggtagctacggaggtggcggcggtagacgcgagggtggaggaggatacagcggcggcggcggcggttactcctcaagaggtggtggtggcggaagctacggtggtggaagacgtgagggaggaggaggatacggtggtggtgaaggaggaggttacggaggaagcggtggtggtggaggatggtaattcctttaattaggtttgggattaccaatgaatgttctctctctcgcttgttatgcttctacttggttttgtgtgttctctattttgttctggttctgctttagatttgatgtaacagttcgtgattaggtattttggtatctggaaacgtaatgttaagtcacttgtcattctctaaataacaaatttcttcggagatattatctctgttgattga

SEQ ID NO: 108664 - protein, 179 aa, Arabidopsis thaliana; identical to SEQ ID NO: 84053
  peptide (1)..(179): Ceres Seq. ID no. 13668029

SEQ ID NO: 108665 - protein, 115 aa, Arabidopsis thaliana; identical to SEQ ID NO: 76878
  peptide (1)..(115): Ceres Seq. ID no. 13668030

SEQ ID NO: 108666 - protein, 108 aa, Arabidopsis thaliana; identical to SEQ ID NO: 76879
  peptide (1)..(108): Ceres Seq. ID no. 13668031

SEQ ID NO: 108667 - DNA, 1444 bp, Arabidopsis thaliana
  misc_feature (1)..(1444): Ceres Seq. ID no. 13668032
  misc_feature (1)..(1444): Ortholog of  Ceres SEQ ID NO 12625388 as cited in SEQ ID NO 63299
  misc_feature (1)..(1444): Ortholog of  Ceres SEQ ID NO 15179860 as cited in SEQ ID NO 66716
aatgaattttggggtcaaattcatttcaactgattcaatcaattctcatgaattccatcttgtcaagcgtccttcctgctcccgaagatcctgttctcagtgtaatttttgcttgtagagatgatcctagtccggttaagttgaatttgagcgcaggtacctatcgaactgaggaaggaaagcctcttgttcttgatgttgtgagaagagcagagcaacagttagccaacgacctggacaaggaatatcttcccctcaatggacttcctgaatttaataaattaagtaccaagctcatcttaggtgatgatagtcctgcattgaaagagaatagagttgttacaacccaatgtttgtctggtactggttctttgagagttggagctgagtttctagcaacacacaacaaagaaagtgtcattttcgttccaaacccaacgtgggggaaccatccccgtatttttactttggcgggtttgtctgtccagtatttccgttattatgatccgaagagccgaggactcgacttcaaaggcatgctcgaggatcttggcgctgcacctcctggagctatagtggtacttcaagcttgtgcgcataaccccacaggagttgacccaacattcgaacaatgggaaaagtttcgacgactagtgagatcgaaaagcttattacctttctttgatagtgcatatcagggttttgctagtggtagccttgacgcagatgcacaagcggttcgtatgtttgtagccgatggaggtgaatgtttgatagctcaaagttatgccaaaaatatgggcctttatggggagcgtattggctctcttacgatcgtatgcacatcagaagatgtcgctaagaaagttgagaaccaagtgctacttgttgtgaggcctatgtatcttacaccacctattcatggtgcatctattgttgccacaattctaaaaaacagtgatatgtacaatgactggaccattgagctgaaaggaatggctgaccgcataattagcatgcgtcaacagttatatgcagctctagaagctagaggaacacctggtgattggagtcacattattaaacatattgggatgtttacttttaccggattgagtgaggagcaagttcgcttgatggccaaagaatatcacatttacatgacttatgatgggaggataagcatggcaagtctaagttcgaagacagtgcctcaactcgctgatgctatacatgctgttgttactcgcatcgcctaattaaatttgcgattctgttcttttgttgtttaatttatgaacacaattagagaataaaactgcgttcttggtttacatttaataagatagcacaaagaagcaatattatggatgatattgtttctagttggtagtcaaacctaccaaaatgaggattgggacctttaaaccaacacagttttttt

SEQ ID NO: 108668 - protein, 403 aa, Arabidopsis thaliana
  peptide (1)..(403): Ceres Seq. ID no. 13668033
MNSILSSVLPAPEDPVLSVIFACRDDPSPVKLNLSAGTYRTEEGKPLVLDVVRRAEQQLANDLDKEYLPLNGLPEFNKLSTKLILGDDSPALKENRVVTTQCLSGTGSLRVGAEFLATHNKESVIFVPNPTWGNHPRIFTLAGLSVQYFRYYDPKSRGLDFKGMLEDLGAAPPGAIVVLQACAHNPTGVDPTFEQWEKFRRLVRSKSLLPFFDSAYQGFASGSLDADAQAVRMFVADGGECLIAQSYAKNMGLYGERIGSLTIVCTSEDVAKKVENQVLLVVRPMYLTPPIHGASIVATILKNSDMYNDWTIELKGMADRIISMRQQLYAALEARGTPGDWSHIIKHIGMFTFTGLSEEQVRLMAKEYHIYMTYDGRISMASLSSKTVPQLADAIHAVVTRIA

SEQ ID NO: 108669 - protein, 240 aa, Arabidopsis thaliana
  peptide (1)..(240): Ceres Seq. ID no. 13668034
MLEDLGAAPPGAIVVLQACAHNPTGVDPTFEQWEKFRRLVRSKSLLPFFDSAYQGFASGSLDADAQAVRMFVADGGECLIAQSYAKNMGLYGERIGSLTIVCTSEDVAKKVENQVLLVVRPMYLTPPIHGASIVATILKNSDMYNDWTIELKGMADRIISMRQQLYAALEARGTPGDWSHIIKHIGMFTFTGLSEEQVRLMAKEYHIYMTYDGRISMASLSSKTVPQLADAIHAVVTRIA

SEQ ID NO: 108670 - DNA, 946 bp, Arabidopsis thaliana
  misc_feature (1)..(946): Ceres Seq. ID no. 13668035
  misc_feature (1)..(946): Ortholog of  Ceres SEQ ID NO 13596902 as cited in SEQ ID NO 62521
ccctgacgtagcctgaagtcggtcgccgcgtctccgcttcatcgtcttccgaagttcgcggcttagtctgctgcggcaccggcgtcggagttgcgatgttcgccaacaagttcccgggcgtctacgcagccacttgtctctccgtcgaagacgccgtcaacgctcgatcaataagcaattgcaatgtcctcgcattctccggcatcaaaacatccccggaaaccgccttggaaatcttcgacgcttggatcaaaactcctttcaaatctccttgtcctgcgtccggatccgaaccatggagctcagttatctcttccttcctcgacaattctctctccgagatgtctcagattggaaagtcaaccgccggcgattcaacaaccaagaagatcgatgaaacaaccgcgtcttgcgtaatttgctgcttggcgaagaacagagagttcactccagtggacatcatgccgggaggctcgatgaagatcgttagagagacgccgacgtcggcgattgtaagattcaaagcgggaagtgtggaaccggcgcatcaccacacattcggccatgaccttgtagtcataaagggaaagaaaagtgtgtggaatctgagcaagaaggagagagctgatctcgttgacggcgattacctattcactcccgccggtgatgttcaccgagtcaaatatcacgaagacactgagttcttcatcacttgggatggccattgggacatattccttgacgaagacctcgaaactgcaaagaaagccatcgaagaagaagcttgaaggtgtaaactttgtgtagtactctcttcttttgaatgttgtaagttctgagagtaaactttcttaaattgatgtactttgtaagaatctttgatttcaaaagatggtgtaatattacaaatactttctcttatgaacactatataaagggtttctac

SEQ ID NO: 108671 - protein, 230 aa, Arabidopsis thaliana
  peptide (1)..(230): Ceres Seq. ID no. 13668036
MFANKFPGVYAATCLSVEDAVNARSISNCNVLAFSGIKTSPETALEIFDAWIKTPFKSPCPASGSEPWSSVISSFLDNSLSEMSQIGKSTAGDSTTKKIDETTASCVICCLAKNREFTPVDIMPGGSMKIVRETPTSAIVRFKAGSVEPAHHHTFGHDLVVIKGKKSVWNLSKKERADLVDGDYLFTPAGDVHRVKYHEDTEFFITWDGHWDIFLDEDLETAKKAIEEEA

SEQ ID NO: 108672 - protein, 148 aa, Arabidopsis thaliana
  peptide (1)..(148): Ceres Seq. ID no. 13668037
MSQIGKSTAGDSTTKKIDETTASCVICCLAKNREFTPVDIMPGGSMKIVRETPTSAIVRFKAGSVEPAHHHTFGHDLVVIKGKKSVWNLSKKERADLVDGDYLFTPAGDVHRVKYHEDTEFFITWDGHWDIFLDEDLETAKKAIEEEA

SEQ ID NO: 108673 - DNA, 1364 bp, Arabidopsis thaliana
  misc_feature (1)..(1364): Ceres Seq. ID no. 13668038
  misc_feature (1)..(1364): Ortholog of  Ceres SEQ ID NO 13598548 as cited in SEQ ID NO 65227
cagatctttccaattgaaagcgaaccgtgaattttgagtctctttaccggaggagaaaaaatgcttggtggattatacggagatcttcctccaccgaccgatgatgagaaacccagtggaaactcctcttccgtctggtcacgcagtaccaaaatggctccacctacacttcgcaaaccaccagcttttgctcccccgcaaacaatcttaagacctctcaacaaacctaaacctatcgtttcggctccgtacaagcctcctccgaattcatcgcaatcggtgcttattccggcgaacgaatcagcaccttcgcatcagcctgcattggttggtgtgacttcatcggtgattgaagagtacgatccagcgagacctaacgattacgaggagtataagagggagaagaagaggaaagctacggaagctgagatgaaacgagagatggataagagaaggcaagtgtatccggaaagagatatgagagaaagagaagagagggagaggagagagagagagataacagtgatcctctcggttgatatctccggtgaggaacgtggaagagaccctgctagagtagtggtggaagtgttgggaagggaagatcctcgtctcctccctgggaatgttgatgggtttagtattgggaaatcgaagccgagtgggttaggagtaggagcaggtggacagatgacacctgctcagaggatgatgccgaagatgggatggaaacaaggacaagggcttgggaaatcagagcaagggattcctacgccattgatggctaagaagactgatcgtagagctggtgtcattgtcaatgctagtgagaataaatcttcttcggcggagaagaaggttgttaagagtgttaatatcaatggtgaaccaaccagggttttgcttcttagaaacatggttgggccaggacaagtagatgatgagctagaagatgaggtaggaggcgagtgtgccaaatacggtacagtcactcgtgtactgatattcgagatcactgaaccgaacttccctgtacacgaagcagtaagaatctttgttcagttttcaagacccgaggaaacaactaaagcccttgtagacctcgatgggagatactttggaggaagaaccgtacgtgcaacgttctatgatgaagagaaattcagtaagaacgagttggctccagttccaggtgaaatccctggctattaataactcctaagacaaagaagaaacttcatcttctaggagattcttgttagagaaagaaatcatagactgaggttttaaaaacatttgtaaagtacttagaaatcttgggttatctctttattgttgttcaataaagcttcacaaggatcaag

SEQ ID NO: 108674 - protein, 383 aa, Arabidopsis thaliana
  peptide (1)..(383): Ceres Seq. ID no. 13668039
MLGGLYGDLPPPTDDEKPSGNSSSVWSRSTKMAPPTLRKPPAFAPPQTILRPLNKPKPIVSAPYKPPPNSSQSVLIPANESAPSHQPALVGVTSSVIEEYDPARPNDYEEYKREKKRKATEAEMKREMDKRRQVYPERDMREREERERREREITVILSVDISGEERGRDPARVVVEVLGREDPRLLPGNVDGFSIGKSKPSGLGVGAGGQMTPAQRMMPKMGWKQGQGLGKSEQGIPTPLMAKKTDRRAGVIVNASENKSSSAEKKVVKSVNINGEPTRVLLLRNMVGPGQVDDELEDEVGGECAKYGTVTRVLIFEITEPNFPVHEAVRIFVQFSRPEETTKALVDLDGRYFGGRTVRATFYDEEKFSKNELAPVPGEIPGY

SEQ ID NO: 108675 - protein, 352 aa, Arabidopsis thaliana
  peptide (1)..(352): Ceres Seq. ID no. 13668040
MAPPTLRKPPAFAPPQTILRPLNKPKPIVSAPYKPPPNSSQSVLIPANESAPSHQPALVGVTSSVIEEYDPARPNDYEEYKREKKRKATEAEMKREMDKRRQVYPERDMREREERERREREITVILSVDISGEERGRDPARVVVEVLGREDPRLLPGNVDGFSIGKSKPSGLGVGAGGQMTPAQRMMPKMGWKQGQGLGKSEQGIPTPLMAKKTDRRAGVIVNASENKSSSAEKKVVKSVNINGEPTRVLLLRNMVGPGQVDDELEDEVGGECAKYGTVTRVLIFEITEPNFPVHEAVRIFVQFSRPEETTKALVDLDGRYFGGRTVRATFYDEEKFSKNELAPVPGEIPGY

SEQ ID NO: 108676 - protein, 260 aa, Arabidopsis thaliana
  peptide (1)..(260): Ceres Seq. ID no. 13668041
MKREMDKRRQVYPERDMREREERERREREITVILSVDISGEERGRDPARVVVEVLGREDPRLLPGNVDGFSIGKSKPSGLGVGAGGQMTPAQRMMPKMGWKQGQGLGKSEQGIPTPLMAKKTDRRAGVIVNASENKSSSAEKKVVKSVNINGEPTRVLLLRNMVGPGQVDDELEDEVGGECAKYGTVTRVLIFEITEPNFPVHEAVRIFVQFSRPEETTKALVDLDGRYFGGRTVRATFYDEEKFSKNELAPVPGEIPGY

SEQ ID NO: 108677 - DNA, 1447 bp, Arabidopsis thaliana
  misc_feature (1)..(1447): Ceres Seq. ID no. 13668042
  misc_feature (1)..(1447): Ortholog of  Ceres SEQ ID NO 13595525 as cited in SEQ ID NO 56679
  misc_feature (1)..(1447): Ortholog of  Ceres SEQ ID NO 15226984 as cited in SEQ ID NO 62173
  misc_feature (1)..(1447): Ortholog of  Ceres SEQ ID NO 14302236 as cited in SEQ ID NO 68793
gagacagacacggaggatggcgaatcagagtacagagacgaatcaaccgtcgaatatgcagacttacggtgtaccgatttacgccgccgactggattccggaggtagatgtcagatccaaaatcataatggatccggagaaatctgaagatgatgatgagtcgtcttcttcttcttcttcttcccggagctgcatcgttttgtccggcggaggcggagagggacgaagtggaatctctaatgtcatattaatatgccgtgttgatctaaacaccaattctctctcggaacaacctctgggtaggcttgtggttggctctgatctgccttatcggatggctgttcatcctcgggaaggtggtcttatttgcgcgttgcctaacagttgcaaactgtttcattgggaagacattatgagccgagaggataatcaggctggtgagtcggaggaagtgattaaagagttaagagatgttggacaacagttggctctggcgtttaatccggaggggtctgttcttgctgctggtgcggaggatgggactttgagggtttttaaatggcctagcatgaatactttacttaatgagtcccaggctcattcttcagttaaatgccttactttcagcgaaagtggtcaatttcttgtatctcttggcggtccagtttgtcgagtttgggacgtgaatgcttctgctgctgttgccagtctatcaaaagagaaggacgagatgtttgcctcctgtagattctctgtagacagtgcaggcaatgaagttctttacattgctgcaaacactgaacgtggtgggagtattataacatgtgatacaaaattatggaaaagaaaatggtcgaagcctataaaaaagaactctatatcagcttttaatgtctcagctgatgggaagcttcttgcaataggaacccttgaaggagatgttttaatacttgaatcgacaagaatgcaaactatccaaatcgtcaagaaagcgcatcttggtttggtcacagcactgactttctctcctgattcaaggggattagtgtcggtatcttttgactcaagggcaaggctgaccatgattgaacaaaagggggacaaacctggagtaaggtggtggctactggttttattgatagtgttgctatacgtggttgcatactattatatgaaggcaaagggtatcataccttagaaaggcctttaagtgaccacacaggacgatacagcggaatggcttgtaaccaacatatcatacgattacgctttgagttagctttttatgtttgacatctaccagaaacttgcttgctttatatcaataaaacatgtaaactaacactaaaacagcaaaagttacaatttgtttcctcttttttttttttgtagacatagtaaactagaaaactattatcatatgatggatcagtaagactctttcttc

SEQ ID NO: 108678 - protein, 398 aa, Arabidopsis thaliana
  peptide (1)..(398): Ceres Seq. ID no. 13668043
RQTRRMANQSTETNQPSNMQTYGVPIYAADWIPEVDVRSKIIMDPEKSEDDDESSSSSSSSRSCIVLSGGGGEGRSGISNVILICRVDLNTNSLSEQPLGRLVVGSDLPYRMAVHPREGGLICALPNSCKLFHWEDIMSREDNQAGESEEVIKELRDVGQQLALAFNPEGSVLAAGAEDGTLRVFKWPSMNTLLNESQAHSSVKCLTFSESGQFLVSLGGPVCRVWDVNASAAVASLSKEKDEMFASCRFSVDSAGNEVLYIAANTERGGSIITCDTKLWKRKWSKPIKKNSISAFNVSADGKLLAIGTLEGDVLILESTRMQTIQIVKKAHLGLVTALTFSPDSRGLVSVSFDSRARLTMIEQKGDKPGVRWWLLVLLIVLLYVVAYYYMKAKGIIP

SEQ ID NO: 108679 - protein, 393 aa, Arabidopsis thaliana
  peptide (1)..(393): Ceres Seq. ID no. 13668044
MANQSTETNQPSNMQTYGVPIYAADWIPEVDVRSKIIMDPEKSEDDDESSSSSSSSRSCIVLSGGGGEGRSGISNVILICRVDLNTNSLSEQPLGRLVVGSDLPYRMAVHPREGGLICALPNSCKLFHWEDIMSREDNQAGESEEVIKELRDVGQQLALAFNPEGSVLAAGAEDGTLRVFKWPSMNTLLNESQAHSSVKCLTFSESGQFLVSLGGPVCRVWDVNASAAVASLSKEKDEMFASCRFSVDSAGNEVLYIAANTERGGSIITCDTKLWKRKWSKPIKKNSISAFNVSADGKLLAIGTLEGDVLILESTRMQTIQIVKKAHLGLVTALTFSPDSRGLVSVSFDSRARLTMIEQKGDKPGVRWWLLVLLIVLLYVVAYYYMKAKGIIP

SEQ ID NO: 108680 - protein, 380 aa, Arabidopsis thaliana
  peptide (1)..(380): Ceres Seq. ID no. 13668045
MQTYGVPIYAADWIPEVDVRSKIIMDPEKSEDDDESSSSSSSSRSCIVLSGGGGEGRSGISNVILICRVDLNTNSLSEQPLGRLVVGSDLPYRMAVHPREGGLICALPNSCKLFHWEDIMSREDNQAGESEEVIKELRDVGQQLALAFNPEGSVLAAGAEDGTLRVFKWPSMNTLLNESQAHSSVKCLTFSESGQFLVSLGGPVCRVWDVNASAAVASLSKEKDEMFASCRFSVDSAGNEVLYIAANTERGGSIITCDTKLWKRKWSKPIKKNSISAFNVSADGKLLAIGTLEGDVLILESTRMQTIQIVKKAHLGLVTALTFSPDSRGLVSVSFDSRARLTMIEQKGDKPGVRWWLLVLLIVLLYVVAYYYMKAKGIIP

SEQ ID NO: 108681 - DNA, 1197 bp, Arabidopsis thaliana
  misc_feature (1)..(1197): Ceres Seq. ID no. 13668054
  misc_feature (1)..(1197): Ortholog of  Ceres SEQ ID NO 15177079 as cited in SEQ ID NO 51989
  misc_feature (1)..(1197): Ortholog of  Ceres SEQ ID NO 14315354 as cited in SEQ ID NO 58232
  misc_feature (1)..(1197): Ortholog of  Ceres SEQ ID NO 13596392 as cited in SEQ ID NO 62136
  misc_feature (1)..(1197): Ortholog of  Ceres SEQ ID NO 13654360 as cited in SEQ ID NO 67980
  misc_feature (1)..(1197): Ortholog of  Ceres SEQ ID NO 13596394 as cited in SEQ ID NO 68561
cgggcaggtcgacgtgttcgatttacaacgattcggtggctattggttgtaagatttagaattaaaggttaaaggagacgacgacgagagatgccgttaaacggagatctcgaccgtcagatcgaacagctaatggagtgtaagccgttaggtgaagcagacgtgaagatcctttgcgatcaagctaaagcgattcttgttgaggaatataatgttcaaccggttaagtgtccggttacggtatgcggcgatatccatggccagttttatgacctaattgagctatttcgtattggtggtaatgctcctgatactaattacctcttcatgggagattatgtagatcgtggctactattctgtagaaacagtctctctattggtggcattaaaggtgcgttacagggacagacttacgatcctgcgagggaatcatgagagccgtcagattacacaagtctatggtttttatgacgaatgcttgaggaaatacggaaatgcaaatgtgtggaagtattttacggaccttttcgattatctccctcttacagcactcatagagagtcaggttttctgtttgcatggaggcctttcaccttctctggatactcttgacaatatccgaagcttggatcgaatacaagaggttccacacgaaggaccaatgtgcgatctactctggtctgatcccgacgatcgttgtggatggggaatatctcctcgtggtgctggttacacgtttggacaggacattgctactcagtttaatcataacaatggactgagtctgatctcaagagcgcatcaacttgtaatggaaggctataattggtgtcaggaaaagaacgtagtgacagtgtttagtgcaccgaactactgttacagatgtggaaacatggccgcaattcttgagattggagaaaagatggaacagaacttccttcaattcgatccagcacctagacaagtcgaacccgataccacgcgcaagacccctgattattttttgtgatttcattttttttcttccaaagtttgtttgttgctgtatcattgtagatgtgtctgttttattttgttttttcgagtctctagatggaatgtgataccaaagacgaaaaacccatcatttttttgttgatgttgatactgaaacaggtttgtagaagcctcttcttattatagaaaatgtcttttg

SEQ ID NO: 108682 - protein, 306 aa, Arabidopsis thaliana; identical to SEQ ID NO: 23564
  peptide (1)..(306): Ceres Seq. ID no. 13668055

SEQ ID NO: 108683 - protein, 292 aa, Arabidopsis thaliana; identical to SEQ ID NO: 23565
  peptide (1)..(292): Ceres Seq. ID no. 13668056

SEQ ID NO: 108684 - protein, 227 aa, Arabidopsis thaliana; identical to SEQ ID NO: 23566
  peptide (1)..(227): Ceres Seq. ID no. 13668057

SEQ ID NO: 108685 - DNA, 1448 bp, Arabidopsis thaliana
  misc_feature (1)..(1448): Ceres Seq. ID no. 13668058
  misc_feature (1)..(1448): Ortholog of  Ceres SEQ ID NO 15177012 as cited in SEQ ID NO 56256
  misc_feature (1)..(1448): Ortholog of  Ceres SEQ ID NO 13596509 as cited in SEQ ID NO 62004
  misc_feature (1)..(1448): Ortholog of  Ceres SEQ ID NO 13500385 as cited in SEQ ID NO 67583
ggaattccctttttcccccaaattcatatccttccttagatatttttctccttcttcttcttctagattccagctactccagaagattcttcgacttaatctgatgtgattaggaagagcaatagaggaagagaatcagaaaaaatggatccggcgactaattcaccgattatgccgattgatttaccgattatgcacgacagtgatcgttacgacttcgttaaagatattggctctggtaatttcggcgttgctcgtctcatgaccgatagagtcaccaaggagcttgttgctgttaaatacatcgagagaggagaaaagattgatgaaaatgttcagagggagattatcaatcatagatcattgagacatcctaatattgttaggtttaaagaggtgattttgacgccttcccatttggctattgttatggaatatgctgctggtggagaactttatgagcggatttgtaatgccggacggtttagtgaagatgaggctcggttcttctttcagcagcttatatctggagttagctattgtcatgcaatgcaaatatgccatcgggatctgaagctggaaaatacattgttagatggaagtccggcacctcgtttgaaaatatgtgattttggttattccaagtcttctgttcttcattcccaaccaaagtcaactgttggtactcctgcatacattgcaccagagattcttcttcgacaggaatatgatggcaagcttgcagatgtatggtcttgcggtgtaacattatatgtaatgttggttggagcttatccattcgaggatccacaggagccacgagattatcgaaagacaatacaaagaatccttagtgtcacatactcgatcccagaggacttacacctctcaccagaatgtcgccatctaatatcgaggatcttcgtggctgatccggcaacaagaatcactattccggagatcacatccgataaatggttcttgaagaatctaccaggtgatttgatggatgagaaccgaatgggaagtcagtttcaagagcctgagcagccaatgcagagccttgacacgattatgcagataatatcggaggctacgattccgactgttcgtaatcgttgcctcgatgatttcatggcggataatcttgatctagacgatgacatggatgactttgattccgaatctgagattgatgttgacagtagtggagagatagtttatgctctctgagattcctgaggacaaagtctgttttgtccgtactgttgagacacaccactggagttttgtcttagctccacgcactccatcgttcatttttggatcgtttgttgttttttactctacaagctttggattcacatacatatatatgtattgtaatgtaatatgtaatatattctatgtatttctctttgtttaataactattggcacattttatac

SEQ ID NO: 108686 - protein, 362 aa, Arabidopsis thaliana; identical to SEQ ID NO: 103144
  peptide (1)..(362): Ceres Seq. ID no. 13668059

SEQ ID NO: 108687 - protein, 353 aa, Arabidopsis thaliana; identical to SEQ ID NO: 103145
  peptide (1)..(353): Ceres Seq. ID no. 13668060

SEQ ID NO: 108688 - protein, 346 aa, Arabidopsis thaliana; identical to SEQ ID NO: 103146
  peptide (1)..(346): Ceres Seq. ID no. 13668061

SEQ ID NO: 108689 - DNA, 674 bp, Arabidopsis thaliana
  misc_feature (1)..(674): Ceres Seq. ID no. 13668062
  misc_feature (1)..(674): Ortholog of  Ceres SEQ ID NO 12474478 as cited in SEQ ID NO 96
  misc_feature (1)..(674): Ortholog of  Ceres SEQ ID NO 14309053 as cited in SEQ ID NO 0
gggttccacttcatacaagcctcttgcaaagccacaacatacccaaccgtatgcgtcaactctctcaccggttacgccaactccatccaaacaagccctcgacgtctagccgagaccgcactcaatgtgaccgtgactcaggcccagtccaccaaggtcttcgtctggcgcttggggcgtttcactagtctcaagaaacgagagattcaagccgttaaggactgcatcgaggagatccatgatgccgttgaccgtttgaccatgtcgatccatgaagtgaagatgtgtggtagtgctaaaggtcgtgaccagttttggttccacatgagcaatgctcaaacgtggaccagcgctgctttgactaatgcaaacacttgctccgatgggtttgcgggtcgggtcatggatgggcgggtaaagaactcagtaagggcacggatcttgaatttgggaagaggaactagtaacgctttagccttgatcaatgctttcgctaaaaaatactaaataatgtaatacattttctttttgttcttaattctgtaatttgagctacgaatgtgtggatcagctcgagggaaattttatttcttaaaatgtttcatgcataatccgatgtaattctggataaattttgattaaaaatgaatgtacaagtataacattgttaagtt

SEQ ID NO: 108690 - protein, 168 aa, Arabidopsis thaliana
  peptide (1)..(168): Ceres Seq. ID no. 13668063
GFHFIQASCKATTYPTVCVNSLTGYANSIQTSPRRLAETALNVTVTQAQSTKVFVWRLGRFTSLKKREIQAVKDCIEEIHDAVDRLTMSIHEVKMCGSAKGRDQFWFHMSNAQTWTSAALTNANTCSDGFAGRVMDGRVKNSVRARILNLGRGTSNALALINAFAKKY

SEQ ID NO: 108691 - DNA, 1082 bp, Arabidopsis thaliana
  misc_feature (1)..(1082): Ceres Seq. ID no. 13668072
  misc_feature (1)..(1082): Ortholog of  Ceres SEQ ID NO 15178083 as cited in SEQ ID NO 56185
  misc_feature (1)..(1082): Ortholog of  Ceres SEQ ID NO 15225046 as cited in SEQ ID NO 57061
  misc_feature (1)..(1082): Ortholog of  Ceres SEQ ID NO 15179881 as cited in SEQ ID NO 66861
cagactctttatttctcttcctcacctaagcttcagcatcgtaaatttaaaactaaaatcgcatcaaatcccggagataggaaagaaaataattgattgtttctagtgaagaacaaaaaaaaaaaagtcgaagactttacatctgggttcatcgatttgagataagatcttctttatttgttatcttcaagtttctgcaatgggtatggcagcagaatcgcagtttcatgttttagctgttgatgatagtttatttgatcggaaacttattgagagattgcttcaaaagtcttcgtgtcaagtaacaactgttgattctggctcaaaggctttggagtttctgggtttaagacaaagtactgatagtaacgacccaaatgcgttttctaaggctcctgttaatcaccaggtagttgaagtgaatcttataattacagattattgtatgcctggcatgactggttatgatttgctcaagaaagtcaaggaatcatcagcttttagagatataccagtagttatcatgtcctcagagaacgttcctgcaagaatcagcagatgtttagaagaaggagctgaagagtttttcttgaaaccagtaagattggctgatcttaacaagttgaaacctcatatgatgaaaacaaagttgaagaaccagaagctggaggagattgagacaacttcaaaagtcgaaaatggagtccccactgcagtagctgatccagagattaaagattcaacaaacattgaaattgaaatcttgcctctgcaacaagatctgctattagttcaacaagaggagcaaacattgagtatcaacaacaagaggaagtcagtggaagaagggatttcaactgatagagcacgtcctagattcgacggtatcgcaaccgctgtctgatctaccagctatgatacttcttttttcggtttctgatttagatttttgtagattttcttaggaatgcttctactggtacagtacatggtttcagtagggaatgcagagaggggaatatgatgatgatgttgtatgtggggataatgtttataagtacatcagtaaatcttacatggtt

SEQ ID NO: 108692 - protein, 234 aa, Arabidopsis thaliana; identical to SEQ ID NO: 83919
  peptide (1)..(234): Ceres Seq. ID no. 13668073

SEQ ID NO: 108693 - protein, 232 aa, Arabidopsis thaliana; identical to SEQ ID NO: 83920
  peptide (1)..(232): Ceres Seq. ID no. 13668074

SEQ ID NO: 108694 - protein, 152 aa, Arabidopsis thaliana; identical to SEQ ID NO: 83921
  peptide (1)..(152): Ceres Seq. ID no. 13668075

SEQ ID NO: 108695 - DNA, 788 bp, Arabidopsis thaliana
  misc_feature (1)..(788): Ceres Seq. ID no. 13668079
  misc_feature (1)..(788): Ortholog of  Ceres SEQ ID NO 13593379 as cited in SEQ ID NO 20573
cgggtacaggaaagggtattgcatgggtgaatggacagagcataggtaggtactggccaactagtatcgctggaaatggcggttgtacagaatcatgcgactatagaggttcttaccgtgcaaacaaatgcctcaagaactgtggaaaaccttcacagacattgtatcatgtacctcgctcgtggctaaaaccgagcgggaacatacttgttctgtttgaggagatgggaggagatccaacacaaatatcatttgcgacaaaacaaacaggaagcaatctttgtctaacggtgtcacagtctcatccaccaccggtggacacatggacttccgactcaaagatctcaaacagaaacagaaccaggccggttctttcgttgaaatgccctatctctactcaggtgatattttctataaaatttgcaagctttggtacacccaaaggtacttgcggtagcttcacacaaggccattgcaatagctctcgatctctctccctcgtccaaaaggcatgtattggattgaggagttgcaacgttgaagtatcgactagagtgttcggggaaccttgtcgtggcgtcgtcaagagcttagctgttgaagcttcttgttcatgaggagtgcccggttcctaaacctctgctgatttgatattattttaagcatgtaattgttggaaataaagcaaaatgaaatggaaattagtagtatagttttatggtctatccaaataaatttggctggaattaaagttactaaactatgtatgtgtgtggtaagcactttgg

SEQ ID NO: 108696 - protein, 204 aa, Arabidopsis thaliana
  peptide (1)..(204): Ceres Seq. ID no. 13668080
GTGKGIAWVNGQSIGRYWPTSIAGNGGCTESCDYRGSYRANKCLKNCGKPSQTLYHVPRSWLKPSGNILVLFEEMGGDPTQISFATKQTGSNLCLTVSQSHPPPVDTWTSDSKISNRNRTRPVLSLKCPISTQVIFSIKFASFGTPKGTCGSFTQGHCNSSRSLSLVQKACIGLRSCNVEVSTRVFGEPCRGVVKSLAVEASCS

SEQ ID NO: 108697 - protein, 130 aa, Arabidopsis thaliana
  peptide (1)..(130): Ceres Seq. ID no. 13668081
MGGDPTQISFATKQTGSNLCLTVSQSHPPPVDTWTSDSKISNRNRTRPVLSLKCPISTQVIFSIKFASFGTPKGTCGSFTQGHCNSSRSLSLVQKACIGLRSCNVEVSTRVFGEPCRGVVKSLAVEASCS

SEQ ID NO: 108698 - DNA, 796 bp, Arabidopsis thaliana
  misc_feature (1)..(796): Ceres Seq. ID no. 13668082
  misc_feature (1)..(796): Ortholog of  Ceres SEQ ID NO 15172991 as cited in SEQ ID NO 51333
  misc_feature (1)..(796): Ortholog of  Ceres SEQ ID NO 13594870 as cited in SEQ ID NO 51929
  misc_feature (1)..(796): Ortholog of  Ceres SEQ ID NO 12610679 as cited in SEQ ID NO 56077
  misc_feature (1)..(796): Ortholog of  Ceres SEQ ID NO 12635481 as cited in SEQ ID NO 0
acaaagcgtacaaatcacaaacacgtagttattctctctttactctctctatttctctctcttcaaaccctacgaagatcttcttcttcttcttcaagaatcgatcatgaaaggagctaaatctaaggctgaaaccaggagcacaaagctctctgtgactaagaagcctgctaagggagccaaaggtgctgctaaagatccaaacaaacctaagaggccttccagtgccttcttcgttttcatggaagatttccgtgtgacgtacaaggaggagcaccctaagaacaagtctgttgctgctgttggcaaagctggtggtgaaaagtggaaatccttgtctgactctgagaaggctccttatgtggctaaggctgacaagcgcaaggttgagtatgagaagaacatgaaagcctacaacaagaaattggaggaaggccctaaggaagatgaggaatctgacaagtcagtttcagaggttaacgatgaggatgatgctgaggatggcagtgaagaggaggaagacgatgattaagaagttgaagttgtggtagcgtaatatagaaggctgcaaggaatctctcggatgtttttatctcctctcttaaaatgttaattcgggtggttaaagtggttttttttttttttctttttctttttcttactgatgtttcgttttagtaaactattacctatctcccactgattctacgggtaatggaaaaagtgaatgtagaatgtttagatggtgaaatgagagatttgtagctctatataatgaatgatttagtttttaatt

SEQ ID NO: 108699 - protein, 141 aa, Arabidopsis thaliana; identical to SEQ ID NO: 28781
  peptide (1)..(141): Ceres Seq. ID no. 13668083

SEQ ID NO: 108700 - protein, 96 aa, Arabidopsis thaliana; identical to SEQ ID NO: 28782
  peptide (1)..(96): Ceres Seq. ID no. 13668084

SEQ ID NO: 108701 - DNA, 1636 bp, Arabidopsis thaliana
  misc_feature (1)..(1636): Ceres Seq. ID no. 13668088
  misc_feature (1)..(1636): Ortholog of  Ceres SEQ ID NO 14311731 as cited in SEQ ID NO 51632
  misc_feature (1)..(1636): Ortholog of  Ceres SEQ ID NO 14315189 as cited in SEQ ID NO 57702
acttacgtgttggatacttaatttgacactcttctttgtgttttctcttccaccttctttttcggtatatcattcaacaaaattctctcttcatttctttattttgttgttttttttattattattgaaatcaagagaattaaaacagaggctctgcaaaagaagatgatcaaaacaatcacatctctacgcaaaactctggttctacctcttcatttacatattcgtacgctacaaactttcgccaagtacaacgcacaagctgcatcggctttgcgagaagagcgtaagaaacctctttatcaaaatggagatgatgtatatgcggatttggattgggataatctcgggtttggtctaaatccagctgattacatgtatgtcatgaaatgctcaaaagacggcgaattcactcaaggagaacttagtccctatgggaatattcagctaagtccttctgctggagtcttaaactatggacaggcgatatacgaaggtacaaaagcatacaggaaagaaaatgggaagcttcttttgtttcgtccggatcacaacgctatccggatgaagcttggcgctgaacggatgctcatgccttctccttcggttgatcagtttgttaatgcagttaaacaaaccgctcttgcaaacaaacgttgggttcctcctgcagggaaagggactttgtacattaggcctttgttgatgggaagtggtccaatacttggtttaggtcctgcacctgaatatacattcattgtctatgcatctccagttggtaactacttcaaggaagggatggctgctcttaacctctatgttgaggaagaatatgtccgagcggctcctggtggagctggaggcgtcaagagcatcacaaattatgcgccagttttgaaagcactgagcagagccaagagtcgggggttttcagacgttctttatctcgactctgtcaagaagaagtacttagaggaggcttcttcttgcaacgtctttgttgtcaagggtcggacaatctcaactcctgcaactaatggaacaattcttgaagggattacgcggaaaagtgtgatggagatcgcaagtgatcaaggttatcaggtagtagagaaggcagttcatgtggatgaagtaatggatgcagatgaagttttttgcaccggaactgctgtagtagttgctcccgtgggcactatcacatatcaggaaaaaagagtagagtataaaaccggggatgaatctgtctgccagaaactgcgttcagtcctcgtaggtatccagacaggattgattgaagataacaagggatgggtcacagatatcaactgaagaataacaatcttcaatattttgccacaaaggagattactctgcattttaagctgtgtatacacgacaatgaagaacactataaacatatatatgagatagaaacagaaagctcttttgctcatttctatatcgtaaagtcaatgtctttcacaaaactatgacaaagaaaagaatcgtctattgtacttgtagacaagtgtttccaaggatagtttcatttcctcctgcagtaactccaaatttacatttcattttaggaggcaaaactgtatatacgtttcaatggctttccccacttctt

SEQ ID NO: 108702 - protein, 388 aa, Arabidopsis thaliana
  peptide (1)..(388): Ceres Seq. ID no. 13668089
MIKTITSLRKTLVLPLHLHIRTLQTFAKYNAQAASALREERKKPLYQNGDDVYADLDWDNLGFGLNPADYMYVMKCSKDGEFTQGELSPYGNIQLSPSAGVLNYGQAIYEGTKAYRKENGKLLLFRPDHNAIRMKLGAERMLMPSPSVDQFVNAVKQTALANKRWVPPAGKGTLYIRPLLMGSGPILGLGPAPEYTFIVYASPVGNYFKEGMAALNLYVEEEYVRAAPGGAGGVKSITNYAPVLKALSRAKSRGFSDVLYLDSVKKKYLEEASSCNVFVVKGRTISTPATNGTILEGITRKSVMEIASDQGYQVVEKAVHVDEVMDADEVFCTGTAVVVAPVGTITYQEKRVEYKTGDESVCQKLRSVLVGIQTGLIEDNKGWVTDIN

SEQ ID NO: 108703 - protein, 318 aa, Arabidopsis thaliana
  peptide (1)..(318): Ceres Seq. ID no. 13668090
MYVMKCSKDGEFTQGELSPYGNIQLSPSAGVLNYGQAIYEGTKAYRKENGKLLLFRPDHNAIRMKLGAERMLMPSPSVDQFVNAVKQTALANKRWVPPAGKGTLYIRPLLMGSGPILGLGPAPEYTFIVYASPVGNYFKEGMAALNLYVEEEYVRAAPGGAGGVKSITNYAPVLKALSRAKSRGFSDVLYLDSVKKKYLEEASSCNVFVVKGRTISTPATNGTILEGITRKSVMEIASDQGYQVVEKAVHVDEVMDADEVFCTGTAVVVAPVGTITYQEKRVEYKTGDESVCQKLRSVLVGIQTGLIEDNKGWVTDIN

SEQ ID NO: 108704 - protein, 315 aa, Arabidopsis thaliana
  peptide (1)..(315): Ceres Seq. ID no. 13668091
MKCSKDGEFTQGELSPYGNIQLSPSAGVLNYGQAIYEGTKAYRKENGKLLLFRPDHNAIRMKLGAERMLMPSPSVDQFVNAVKQTALANKRWVPPAGKGTLYIRPLLMGSGPILGLGPAPEYTFIVYASPVGNYFKEGMAALNLYVEEEYVRAAPGGAGGVKSITNYAPVLKALSRAKSRGFSDVLYLDSVKKKYLEEASSCNVFVVKGRTISTPATNGTILEGITRKSVMEIASDQGYQVVEKAVHVDEVMDADEVFCTGTAVVVAPVGTITYQEKRVEYKTGDESVCQKLRSVLVGIQTGLIEDNKGWVTDIN

SEQ ID NO: 108705 - DNA, 3076 bp, Arabidopsis thaliana
  misc_feature (1)..(3076): Ceres Seq. ID no. 13668100
  misc_feature (1)..(3076): Ortholog of  Ceres SEQ ID NO 14308209 as cited in SEQ ID NO 58800
agatctcatctcactcacaagagagagatagagagagaaaaaggctctgctttctacattatttacgattatacactttccaacatggcggcctctgtagataatcgccaatacgctcgtctcgagccaggtttgaacggcgtggttcgttcttacaaacctcccgttccaggccggtccgattcccctaaggcgcaccagaaccaaaccaccaaccaaaccgtgttcttgaaaccagccaaggttcatgacgatgacgaagacgtgtcgagcgaagacgagaacgagacacacaacagcaacgccgtgtactacaaggagatgataagaaaatccaacgccgagcttgaaccgtccgttttggacccgagggacgaatacacggctgatagctggatcgagcgtaacccttccatggtacgtctcacagggaaacatcccttcaactccgaggcgcctcttaaccgtttaatgcaccacgggtttatcacccctgtcccgttgcactacgttcgtaaccacggccacgtccctaaagcccaatgggccgaatggacggtcgaggtgaccggattcgtcaaacggcccatgaaattcaccatggaccagctcgtctccgagtttgcttaccgcgagttcgccgcgacgctagtctgcgcggggaaccgccgtaaggaacagaacatggtgaagaagtcaaagggattcaactggggatccgccggagtttccacctccgtgtggcgtggtgtccctctctgcgacgtactgcgtcgctgcgggatctttagccgaaaaggcggcgctctcaacgtctgcttcgaagggtcggaggatcttccgggcggtgccggaactgctggttccaaatacggaacgagcatcaagaaggaatatgccatggatccatcaagagacatcattttggcttatatgcaaaacggagagtatctaacaccagaccacggttttccggttcggatcatcatccccggtttcattggtggccggatggttaaatggttgaaacgaatcattgtcacaactaaagaatccgacaatttctaccatttcaaggacaacagagttttaccttctttggtagacgccgaactcgccgacgaagaaggttggtggtataagccagagtacataatcaacgagctaaacataaactccgtgattacgacgccatgtcacgaggagattcttcccatcaacgctttcacaacccaaagaccttatactttaaagggttacgcatattccggaggtggaaaaaaagtgacccgtgtggaggtcacggtagatggtggagagacatggaacgtatgtgcacttgaccatcaagagaagccaaacaagtatgggaagttctggtgttggtgtttttggtcacttgaggttgaggttttggacttgcttagtgccaaagagattgctgttcgtgcatgggacgagactctcaacacgcagcccgagaaaatgatatggaatctcatggggatgatgaataactgctggtttagagtgaagactaacgtgtgcaagccacacaagggagagattgggattgtgttcgagcatccaacgcttcctggtaatgaatctggtggatggatggcgaaggaacgtcacctcgaaaaatcggctgacgcgcctcctagtctaaagaagtctgtctcgacgccgtttatgaacacaactgcgaagatgtactcgatgtccgaggtcaagaagcataattcggctgactcttgctggatcattgtccatggacatatctatgattgtacacgattccttatggatcacccgggtggttcggattcaatcttgatcaatgctggtacggattgtacggaggagtttgaagccattcactcggataaagccaagaagatgcttgaggattaccgtatcggtgagctcatcaccactggttattcctctgactcttcctcgcctaacaactcggttcacggttcatccgccgtgttctcgctgttggctcccattggagaggcgactccggttaggaacctcgctttggttaatccccgggctaaagtcccggttcaactcgtcgaaaagacttccatttctcatgatgttcgtaaattccggtttgctttaccggttgaggatatggttctaggcttaccggttggtaagcacattttcctttgcgccaccatcaatgacaagctctgcctcagagcttacacaccaagcagcaccgttgatgtggttggctacttcgagctcgtggtcaagatttactttggcggtgtccacccaagattccctaacggcgggctcatgtctcagtacctagactctttgcctatagggtcaactttggagattaaaggaccattgggtcacgttgagtatctcggcaagggtagtttcacggttcacggtaaaccaaagtttgctgataaattggcaatgttggcaggtggaaccggaataactccggtttaccaaattatccaagccattctcaaggatccagaggatgagactgaaatgtacgtcatttatgctaaccggaccgaggaagatattctcctaagggaggaactggatggttgggcagagcaatacccggaccggttaaaggtttggtacgtagtggaatcagctaaggaaggttgggcatacagtaccgggtttatttccgaggcgattatgcgagaacatatccctgatggattagatggctcagcccttgccatggcttgcggaccaccaccgatgattcagtttgcggttcagccgaatttggagaagatgcaatataacatcaaggaggatttcttgatattctagtctaaagccaagatatttcaaagtcaaaacgttaagtcgtcaaaaagcctagtgttatgatagattctaaataagtattgagggatttgtttgtatataatgttggttctttaaagtcttggatttggaaatataatgtgttcgttgtattcacgatcgatattttttttcacaataatatacaaaaagtaatttcagaaatttttgtggttaggttatcgtacattgaattttctgc

SEQ ID NO: 108706 - protein, 945 aa, Arabidopsis thaliana
  peptide (1)..(945): Ceres Seq. ID no. 13668101
RSHLTHKREIEREKGSAFYIIYDYTLSNMAASVDNRQYARLEPGLNGVVRSYKPPVPGRSDSPKAHQNQTTNQTVFLKPAKVHDDDEDVSSEDENETHNSNAVYYKEMIRKSNAELEPSVLDPRDEYTADSWIERNPSMVRLTGKHPFNSEAPLNRLMHHGFITPVPLHYVRNHGHVPKAQWAEWTVEVTGFVKRPMKFTMDQLVSEFAYREFAATLVCAGNRRKEQNMVKKSKGFNWGSAGVSTSVWRGVPLCDVLRRCGIFSRKGGALNVCFEGSEDLPGGAGTAGSKYGTSIKKEYAMDPSRDIILAYMQNGEYLTPDHGFPVRIIIPGFIGGRMVKWLKRIIVTTKESDNFYHFKDNRVLPSLVDAELADEEGWWYKPEYIINELNINSVITTPCHEEILPINAFTTQRPYTLKGYAYSGGGKKVTRVEVTVDGGETWNVCALDHQEKPNKYGKFWCWCFWSLEVEVLDLLSAKEIAVRAWDETLNTQPEKMIWNLMGMMNNCWFRVKTNVCKPHKGEIGIVFEHPTLPGNESGGWMAKERHLEKSADAPPSLKKSVSTPFMNTTAKMYSMSEVKKHNSADSCWIIVHGHIYDCTRFLMDHPGGSDSILINAGTDCTEEFEAIHSDKAKKMLEDYRIGELITTGYSSDSSSPNNSVHGSSAVFSLLAPIGEATPVRNLALVNPRAKVPVQLVEKTSISHDVRKFRFALPVEDMVLGLPVGKHIFLCATINDKLCLRAYTPSSTVDVVGYFELVVKIYFGGVHPRFPNGGLMSQYLDSLPIGSTLEIKGPLGHVEYLGKGSFTVHGKPKFADKLAMLAGGTGITPVYQIIQAILKDPEDETEMYVIYANRTEEDILLREELDGWAEQYPDRLKVWYVVESAKEGWAYSTGFISEAIMREHIPDGLDGSALAMACGPPPMIQFAVQPNLEKMQYNIKEDFLIF

SEQ ID NO: 108707 - protein, 917 aa, Arabidopsis thaliana; identical to SEQ ID NO: 45155
  peptide (1)..(917): Ceres Seq. ID no. 13668102

SEQ ID NO: 108708 - protein, 838 aa, Arabidopsis thaliana; identical to SEQ ID NO: 45156
  peptide (1)..(838): Ceres Seq. ID no. 13668103

SEQ ID NO: 108709 - DNA, 1243 bp, Arabidopsis thaliana
  misc_feature (1)..(1243): Ceres Seq. ID no. 13668108
  misc_feature (1)..(1243): Ortholog of  Ceres SEQ ID NO 13495070 as cited in SEQ ID NO 53216
  misc_feature (1)..(1243): Ortholog of  Ceres SEQ ID NO 13656228 as cited in SEQ ID NO 65648
  misc_feature (1)..(1243): Ortholog of  Ceres SEQ ID NO 15179618 as cited in SEQ ID NO 0
tcttccccaccactccgattcatctttatcctctctctcatctcgtccgttgttgcataagtgctatggatctcgcgtcgaatcttggtgggaagatcgataaatccgatgttctcaccgccgtcgaaaagtatgagcaatatcatgtcttccatggaggaaacgaggaagagagaaaagccaattatactgacatggttaataagtactatgaccttgctactagcttttatgagtacggatggggagaatccttccattttgcacaaagatggaaaggagaatcgcttcgagagagtattaagcgacacgagcactttcttgctcttcagcttggcatccaaccaggacaaaaggtactggatgtaggatgtggaattggtggaccgttgagggaaattgcaagattcagcaattcagttgttaccgggctcaacaataacgaataccagatcaccagaggcaaggaactaaaccgacttgcaggtgtcgacaagacatgtaactttgtcaaggctgacttcatgaagatgccattcccggaaaacagtttcgatgcagtttatgcaatagaagcaacttgccatgcacctgatgcgtatggatgctacaaagagatctacagagtgctaaagcctgggcaatgttttgctgcctatgagtggtgtatgactgatgcatttgaccctgataacgccgaacatcagaaaataaagggagagatagagattggagatggtcttcctgacattaggctgactacaaaatgcctcgaagctctgaagcaggccggttttgaagtgatatgggaaaaggatctggccaaggactcgccggtcccatggtacttacctcttgacaaaaatcatttctcactcagtagcttccgccttacagctgttggacgattcataaccaaaaacatggtcaagatccttgaatacataagacttgcacctcaaggaagccaaagggtctcaaatttcctggagcaggctgcggaaggattagtcgacggtggaaggagagagattttcacgccaatgtatttcttcttggcccggaagccagagtaagcggatgagagatggcgatggtcatcgtaggtcgaatgaagtgacaaaatttctcaatttgcagtcttattttctatgtttatcggatttgttgcagagtttcttattcaccaactatattttggatgttcgtaacatgtcacgtgttgttcatgtgcactctgcct

SEQ ID NO: 108710 - protein, 357 aa, Arabidopsis thaliana
  peptide (1)..(357): Ceres Seq. ID no. 13668109
FPTTPIHLYPLSHLVRCCISAMDLASNLGGKIDKSDVLTAVEKYEQYHVFHGGNEEERKANYTDMVNKYYDLATSFYEYGWGESFHFAQRWKGESLRESIKRHEHFLALQLGIQPGQKVLDVGCGIGGPLREIARFSNSVVTGLNNNEYQITRGKELNRLAGVDKTCNFVKADFMKMPFPENSFDAVYAIEATCHAPDAYGCYKEIYRVLKPGQCFAAYEWCMTDAFDPDNAEHQKIKGEIEIGDGLPDIRLTTKCLEALKQAGFEVIWEKDLAKDSPVPWYLPLDKNHFSLSSFRLTAVGRFITKNMVKILEYIRLAPQGSQRVSNFLEQAAEGLVDGGRREIFTPMYFFLARKPE

SEQ ID NO: 108711 - protein, 864 aa, Arabidopsis thaliana; identical to SEQ ID NO: 97472
  peptide (1)..(864): Ceres Seq. ID no. 12737658

SEQ ID NO: 108712 - protein, 717 aa, Arabidopsis thaliana; identical to SEQ ID NO: 97473
  peptide (1)..(717): Ceres Seq. ID no. 12737659

SEQ ID NO: 108713 - protein, 588 aa, Arabidopsis thaliana; identical to SEQ ID NO: 97474
  peptide (1)..(588): Ceres Seq. ID no. 12737660

SEQ ID NO: 108714 - DNA, 2667 bp, Arabidopsis thaliana; identical to SEQ ID NO: 97475
  misc_feature (1)..(2667): Ceres Seq. ID no. 12737661
  misc_feature (1)..(2667): Ortholog of  Ceres SEQ ID NO 13584744 as cited in SEQ ID NO 69137

SEQ ID NO: 108715 - protein, 888 aa, Arabidopsis thaliana; identical to SEQ ID NO: 97476
  peptide (1)..(888): Ceres Seq. ID no. 12737662

SEQ ID NO: 108716 - protein, 745 aa, Arabidopsis thaliana; identical to SEQ ID NO: 97477
  peptide (1)..(745): Ceres Seq. ID no. 12737663

SEQ ID NO: 108717 - protein, 616 aa, Arabidopsis thaliana; identical to SEQ ID NO: 97478
  peptide (1)..(616): Ceres Seq. ID no. 12737664

SEQ ID NO: 108718 - DNA, 1953 bp, Arabidopsis thaliana; identical to SEQ ID NO: 97479
  misc_feature (1)..(1953): Ceres Seq. ID no. 12737671
  misc_feature (1)..(1953): Ortholog of  Ceres SEQ ID NO 13657677 as cited in SEQ ID NO 66119

SEQ ID NO: 108719 - protein, 650 aa, Arabidopsis thaliana; identical to SEQ ID NO: 97480
  peptide (1)..(650): Ceres Seq. ID no. 12737672

SEQ ID NO: 108720 - protein, 489 aa, Arabidopsis thaliana; identical to SEQ ID NO: 97481
  peptide (1)..(489): Ceres Seq. ID no. 12737673

SEQ ID NO: 108721 - protein, 462 aa, Arabidopsis thaliana; identical to SEQ ID NO: 97482
  peptide (1)..(462): Ceres Seq. ID no. 12737674

SEQ ID NO: 108722 - DNA, 1620 bp, Arabidopsis thaliana; identical to SEQ ID NO: 97483
  misc_feature (1)..(1620): Ceres Seq. ID no. 12737701
  misc_feature (1)..(1620): Ortholog of  Ceres SEQ ID NO 13574398 as cited in SEQ ID NO 0

SEQ ID NO: 108723 - protein, 539 aa, Arabidopsis thaliana; identical to SEQ ID NO: 97484
  peptide (1)..(539): Ceres Seq. ID no. 12737702

SEQ ID NO: 108724 - protein, 522 aa, Arabidopsis thaliana; identical to SEQ ID NO: 97485
  peptide (1)..(522): Ceres Seq. ID no. 12737703

SEQ ID NO: 108725 - protein, 504 aa, Arabidopsis thaliana; identical to SEQ ID NO: 97486
  peptide (1)..(504): Ceres Seq. ID no. 12737704

SEQ ID NO: 108726 - DNA, 930 bp, Arabidopsis thaliana; identical to SEQ ID NO: 97487
  misc_feature (1)..(930): Ceres Seq. ID no. 12737781
  misc_feature (1)..(930): Ortholog of  Ceres SEQ ID NO 12615972 as cited in SEQ ID NO 62455
  misc_feature (1)..(930): Ortholog of  Ceres SEQ ID NO 13596229 as cited in SEQ ID NO 68800

SEQ ID NO: 108727 - protein, 309 aa, Arabidopsis thaliana; identical to SEQ ID NO: 97488
  peptide (1)..(309): Ceres Seq. ID no. 12737782

SEQ ID NO: 108728 - protein, 259 aa, Arabidopsis thaliana; identical to SEQ ID NO: 97489
  peptide (1)..(259): Ceres Seq. ID no. 12737783

SEQ ID NO: 108729 - protein, 229 aa, Arabidopsis thaliana; identical to SEQ ID NO: 97490
  peptide (1)..(229): Ceres Seq. ID no. 12737784

SEQ ID NO: 108730 - DNA, 1961 bp, Arabidopsis thaliana; identical to SEQ ID NO: 97491
  misc_feature (1)..(1961): Ceres Seq. ID no. 12737805
  misc_feature (1)..(1961): Ortholog of  Ceres SEQ ID NO 14302351 as cited in SEQ ID NO 66690

SEQ ID NO: 108731 - protein, 546 aa, Arabidopsis thaliana; identical to SEQ ID NO: 97492
  peptide (1)..(546): Ceres Seq. ID no. 12737806

SEQ ID NO: 108732 - protein, 523 aa, Arabidopsis thaliana; identical to SEQ ID NO: 97493
  peptide (1)..(523): Ceres Seq. ID no. 12737807

SEQ ID NO: 108733 - protein, 486 aa, Arabidopsis thaliana; identical to SEQ ID NO: 97494
  peptide (1)..(486): Ceres Seq. ID no. 12737808

SEQ ID NO: 108734 - DNA, 2640 bp, Arabidopsis thaliana; identical to SEQ ID NO: 97495
  misc_feature (1)..(2640): Ceres Seq. ID no. 12737864
  misc_feature (1)..(2640): Ortholog of  Ceres SEQ ID NO 15224874 as cited in SEQ ID NO 55015

SEQ ID NO: 108735 - protein, 794 aa, Arabidopsis thaliana; identical to SEQ ID NO: 97496
  peptide (1)..(794): Ceres Seq. ID no. 12737865

SEQ ID NO: 108736 - protein, 682 aa, Arabidopsis thaliana; identical to SEQ ID NO: 97497
  peptide (1)..(682): Ceres Seq. ID no. 12737866

SEQ ID NO: 108737 - protein, 625 aa, Arabidopsis thaliana; identical to SEQ ID NO: 97498
  peptide (1)..(625): Ceres Seq. ID no. 12737867

SEQ ID NO: 108738 - DNA, 1221 bp, Arabidopsis thaliana; identical to SEQ ID NO: 97499
  misc_feature (1)..(1221): Ceres Seq. ID no. 12737868
  misc_feature (1)..(1221): Ortholog of  Ceres SEQ ID NO 13657789 as cited in SEQ ID NO 66154

SEQ ID NO: 108739 - protein, 406 aa, Arabidopsis thaliana; identical to SEQ ID NO: 97500
  peptide (1)..(406): Ceres Seq. ID no. 12737869

SEQ ID NO: 108740 - protein, 378 aa, Arabidopsis thaliana; identical to SEQ ID NO: 97501
  peptide (1)..(378): Ceres Seq. ID no. 12737870

SEQ ID NO: 108741 - protein, 290 aa, Arabidopsis thaliana; identical to SEQ ID NO: 97502
  peptide (1)..(290): Ceres Seq. ID no. 12737871

SEQ ID NO: 108742 - DNA, 2646 bp, Arabidopsis thaliana; identical to SEQ ID NO: 97503
  misc_feature (1)..(2646): Ceres Seq. ID no. 12737923
  misc_feature (1)..(2646): Ortholog of  Ceres SEQ ID NO 13593911 as cited in SEQ ID NO 52935

SEQ ID NO: 108743 - protein, 881 aa, Arabidopsis thaliana; identical to SEQ ID NO: 97504
  peptide (1)..(881): Ceres Seq. ID no. 12737924

SEQ ID NO: 108744 - protein, 825 aa, Arabidopsis thaliana; identical to SEQ ID NO: 97505
  peptide (1)..(825): Ceres Seq. ID no. 12737925

SEQ ID NO: 108745 - protein, 790 aa, Arabidopsis thaliana; identical to SEQ ID NO: 97506
  peptide (1)..(790): Ceres Seq. ID no. 12737926

SEQ ID NO: 108746 - DNA, 1886 bp, Arabidopsis thaliana; identical to SEQ ID NO: 97507
  misc_feature (1)..(1886): Ceres Seq. ID no. 12737960
  misc_feature (1)..(1886): Ortholog of  Ceres SEQ ID NO 13594037 as cited in SEQ ID NO 55666
  misc_feature (1)..(1886): Ortholog of  Ceres SEQ ID NO 13657707 as cited in SEQ ID NO 66407

SEQ ID NO: 108747 - protein, 595 aa, Arabidopsis thaliana; identical to SEQ ID NO: 97508
  peptide (1)..(595): Ceres Seq. ID no. 12737961

SEQ ID NO: 108748 - protein, 587 aa, Arabidopsis thaliana; identical to SEQ ID NO: 97509
  peptide (1)..(587): Ceres Seq. ID no. 12737962

SEQ ID NO: 108749 - protein, 380 aa, Arabidopsis thaliana; identical to SEQ ID NO: 97510
  peptide (1)..(380): Ceres Seq. ID no. 12737963

SEQ ID NO: 108750 - DNA, 939 bp, Arabidopsis thaliana; identical to SEQ ID NO: 97511
  misc_feature (1)..(939): Ceres Seq. ID no. 12737980
  misc_feature (1)..(939): Ortholog of  Ceres SEQ ID NO 13599448 as cited in SEQ ID NO 521
  misc_feature (1)..(939): Ortholog of  Ceres SEQ ID NO 14307472 as cited in SEQ ID NO 54559
  misc_feature (1)..(939): Ortholog of  Ceres SEQ ID NO 13596408 as cited in SEQ ID NO 62028

SEQ ID NO: 108751 - protein, 187 aa, Arabidopsis thaliana; identical to SEQ ID NO: 97512
  peptide (1)..(187): Ceres Seq. ID no. 12737981

SEQ ID NO: 108752 - protein, 186 aa, Arabidopsis thaliana; identical to SEQ ID NO: 97513
  peptide (1)..(186): Ceres Seq. ID no. 12737982

SEQ ID NO: 108753 - protein, 177 aa, Arabidopsis thaliana; identical to SEQ ID NO: 26833
  peptide (1)..(177): Ceres Seq. ID no. 12737983

SEQ ID NO: 108754 - DNA, 1418 bp, Arabidopsis thaliana; identical to SEQ ID NO: 97515
  misc_feature (1)..(1418): Ceres Seq. ID no. 12738006
  misc_feature (1)..(1418): Ortholog of  Ceres SEQ ID NO 14307273 as cited in SEQ ID NO 54302
  misc_feature (1)..(1418): Ortholog of  Ceres SEQ ID NO 13655375 as cited in SEQ ID NO 63347
  misc_feature (1)..(1418): Ortholog of  Ceres SEQ ID NO 12626166 as cited in SEQ ID NO 64505
  misc_feature (1)..(1418): Ortholog of  Ceres SEQ ID NO 14301978 as cited in SEQ ID NO 0

SEQ ID NO: 108755 - protein, 350 aa, Arabidopsis thaliana; identical to SEQ ID NO: 22526
  peptide (1)..(350): Ceres Seq. ID no. 12738007

SEQ ID NO: 108756 - protein, 335 aa, Arabidopsis thaliana; identical to SEQ ID NO: 22527
  peptide (1)..(335): Ceres Seq. ID no. 12738008

SEQ ID NO: 108757 - protein, 330 aa, Arabidopsis thaliana; identical to SEQ ID NO: 22528
  peptide (1)..(330): Ceres Seq. ID no. 12738009

SEQ ID NO: 108758 - DNA, 833 bp, Arabidopsis thaliana; identical to SEQ ID NO: 97519
  misc_feature (1)..(833): Ceres Seq. ID no. 12738010
  misc_feature (1)..(833): Ortholog of  Ceres SEQ ID NO 12626166 as cited in SEQ ID NO 64505

SEQ ID NO: 108759 - protein, 143 aa, Arabidopsis thaliana; identical to SEQ ID NO: 40923
  peptide (1)..(143): Ceres Seq. ID no. 12738011

SEQ ID NO: 108760 - protein, 128 aa, Arabidopsis thaliana; identical to SEQ ID NO: 40924
  peptide (1)..(128): Ceres Seq. ID no. 12738012

SEQ ID NO: 108761 - protein, 123 aa, Arabidopsis thaliana; identical to SEQ ID NO: 40925
  peptide (1)..(123): Ceres Seq. ID no. 12738013

SEQ ID NO: 108762 - DNA, 1400 bp, Arabidopsis thaliana; identical to SEQ ID NO: 97523
  misc_feature (1)..(1400): Ceres Seq. ID no. 12738066
  misc_feature (1)..(1400): Ortholog of  Ceres SEQ ID NO 13596392 as cited in SEQ ID NO 62136
  misc_feature (1)..(1400): Ortholog of  Ceres SEQ ID NO 13654360 as cited in SEQ ID NO 67980
  misc_feature (1)..(1400): Ortholog of  Ceres SEQ ID NO 13596394 as cited in SEQ ID NO 68561

SEQ ID NO: 108763 - protein, 331 aa, Arabidopsis thaliana; identical to SEQ ID NO: 97524
  peptide (1)..(331): Ceres Seq. ID no. 12738067

SEQ ID NO: 108764 - DNA, 1013 bp, Arabidopsis thaliana; identical to SEQ ID NO: 97525
  misc_feature (1)..(1013): Ceres Seq. ID no. 12738271
  misc_feature (1)..(1013): Ortholog of  Ceres SEQ ID NO 14315553 as cited in SEQ ID NO 60445
  misc_feature (1)..(1013): Ortholog of  Ceres SEQ ID NO 13598045 as cited in SEQ ID NO 66822

SEQ ID NO: 108765 - protein, 264 aa, Arabidopsis thaliana; identical to SEQ ID NO: 97526
  peptide (1)..(264): Ceres Seq. ID no. 12738272

SEQ ID NO: 108766 - protein, 246 aa, Arabidopsis thaliana; identical to SEQ ID NO: 97527
  peptide (1)..(246): Ceres Seq. ID no. 12738273

SEQ ID NO: 108767 - protein, 138 aa, Arabidopsis thaliana; identical to SEQ ID NO: 97528
  peptide (1)..(138): Ceres Seq. ID no. 12738274

SEQ ID NO: 108768 - DNA, 1722 bp, Arabidopsis thaliana; identical to SEQ ID NO: 97529
  misc_feature (1)..(1722): Ceres Seq. ID no. 12738307
  misc_feature (1)..(1722): Ortholog of  Ceres SEQ ID NO 13599324 as cited in SEQ ID NO 0

SEQ ID NO: 108769 - protein, 486 aa, Arabidopsis thaliana; identical to SEQ ID NO: 97530
  peptide (1)..(486): Ceres Seq. ID no. 12738308

SEQ ID NO: 108770 - protein, 298 aa, Arabidopsis thaliana; identical to SEQ ID NO: 28197
  peptide (1)..(298): Ceres Seq. ID no. 12738309

SEQ ID NO: 108771 - DNA, 984 bp, Arabidopsis thaliana; identical to SEQ ID NO: 97532
  misc_feature (1)..(984): Ceres Seq. ID no. 12738318
  misc_feature (1)..(984): Ortholog of  Ceres SEQ ID NO 14305357 as cited in SEQ ID NO 60046
  misc_feature (1)..(984): Ortholog of  Ceres SEQ ID NO 14313511 as cited in SEQ ID NO 64459
  misc_feature (1)..(984): Ortholog of  Ceres SEQ ID NO 14303006 as cited in SEQ ID NO 67498
  misc_feature (1)..(984): Ortholog of  Ceres SEQ ID NO 13599627 as cited in SEQ ID NO 0
  misc_feature (1)..(984): Ortholog of  Ceres SEQ ID NO 14305069 as cited in SEQ ID NO 0

SEQ ID NO: 108772 - protein, 236 aa, Arabidopsis thaliana; identical to SEQ ID NO: 28883
  peptide (1)..(236): Ceres Seq. ID no. 12738319

SEQ ID NO: 108773 - protein, 220 aa, Arabidopsis thaliana; identical to SEQ ID NO: 28884
  peptide (1)..(220): Ceres Seq. ID no. 12738320

SEQ ID NO: 108774 - DNA, 1922 bp, Arabidopsis thaliana; identical to SEQ ID NO: 97535
  misc_feature (1)..(1922): Ceres Seq. ID no. 12738434
  misc_feature (1)..(1922): Ortholog of  Ceres SEQ ID NO 13582619 as cited in SEQ ID NO 56520
  misc_feature (1)..(1922): Ortholog of  Ceres SEQ ID NO 13660872 as cited in SEQ ID NO 60830
  misc_feature (1)..(1922): Ortholog of  Ceres SEQ ID NO 12616221 as cited in SEQ ID NO 63291

SEQ ID NO: 108775 - protein, 570 aa, Arabidopsis thaliana; identical to SEQ ID NO: 97536
  peptide (1)..(570): Ceres Seq. ID no. 12738435

SEQ ID NO: 108776 - protein, 569 aa, Arabidopsis thaliana; identical to SEQ ID NO: 97537
  peptide (1)..(569): Ceres Seq. ID no. 12738436

SEQ ID NO: 108777 - protein, 498 aa, Arabidopsis thaliana; identical to SEQ ID NO: 97538
  peptide (1)..(498): Ceres Seq. ID no. 12738437

SEQ ID NO: 108778 - DNA, 1593 bp, Arabidopsis thaliana; identical to SEQ ID NO: 97539
  misc_feature (1)..(1593): Ceres Seq. ID no. 12738509
  misc_feature (1)..(1593): Ortholog of  Ceres SEQ ID NO 14308803 as cited in SEQ ID NO 55038
  misc_feature (1)..(1593): Ortholog of  Ceres SEQ ID NO 13595437 as cited in SEQ ID NO 56562

SEQ ID NO: 108779 - protein, 354 aa, Arabidopsis thaliana; identical to SEQ ID NO: 47286
  peptide (1)..(354): Ceres Seq. ID no. 12738510

SEQ ID NO: 108780 - protein, 348 aa, Arabidopsis thaliana; identical to SEQ ID NO: 47287
  peptide (1)..(348): Ceres Seq. ID no. 12738511

SEQ ID NO: 108781 - protein, 200 aa, Arabidopsis thaliana; identical to SEQ ID NO: 47288
  peptide (1)..(200): Ceres Seq. ID no. 12738512

SEQ ID NO: 108782 - DNA, 2931 bp, Arabidopsis thaliana; identical to SEQ ID NO: 97543
  misc_feature (1)..(2931): Ceres Seq. ID no. 12738620
  misc_feature (1)..(2931): Ortholog of  Ceres SEQ ID NO 15176851 as cited in SEQ ID NO 61348
  misc_feature (1)..(2931): Ortholog of  Ceres SEQ ID NO 14307871 as cited in SEQ ID NO 67222

SEQ ID NO: 108783 - protein, 447 aa, Arabidopsis thaliana; identical to SEQ ID NO: 49987
  peptide (1)..(447): Ceres Seq. ID no. 12738621

SEQ ID NO: 108784 - protein, 402 aa, Arabidopsis thaliana; identical to SEQ ID NO: 49988
  peptide (1)..(402): Ceres Seq. ID no. 12738622

SEQ ID NO: 108785 - protein, 317 aa, Arabidopsis thaliana; identical to SEQ ID NO: 49989
  peptide (1)..(317): Ceres Seq. ID no. 12738623

SEQ ID NO: 108786 - DNA, 1529 bp, Arabidopsis thaliana; identical to SEQ ID NO: 97547
  misc_feature (1)..(1529): Ceres Seq. ID no. 12738724
  misc_feature (1)..(1529): Ortholog of  Ceres SEQ ID NO 13595164 as cited in SEQ ID NO 56222
  misc_feature (1)..(1529): Ortholog of  Ceres SEQ ID NO 13591068 as cited in SEQ ID NO 69043
  misc_feature (1)..(1529): Ortholog of  Ceres SEQ ID NO 13623041 as cited in SEQ ID NO 0

SEQ ID NO: 108787 - protein, 417 aa, Arabidopsis thaliana; identical to SEQ ID NO: 97548
  peptide (1)..(417): Ceres Seq. ID no. 12738725

SEQ ID NO: 108788 - protein, 404 aa, Arabidopsis thaliana; identical to SEQ ID NO: 49383
  peptide (1)..(404): Ceres Seq. ID no. 12738726

SEQ ID NO: 108789 - protein, 293 aa, Arabidopsis thaliana; identical to SEQ ID NO: 49384
  peptide (1)..(293): Ceres Seq. ID no. 12738727

SEQ ID NO: 108790 - DNA, 1109 bp, Arabidopsis thaliana; identical to SEQ ID NO: 97551
  misc_feature (1)..(1109): Ceres Seq. ID no. 12738760
  misc_feature (1)..(1109): Ortholog of  Ceres SEQ ID NO 15172803 as cited in SEQ ID NO 52102
  misc_feature (1)..(1109): Ortholog of  Ceres SEQ ID NO 12593499 as cited in SEQ ID NO 68777

SEQ ID NO: 108791 - protein, 284 aa, Arabidopsis thaliana; identical to SEQ ID NO: 97552
  peptide (1)..(284): Ceres Seq. ID no. 12738761

SEQ ID NO: 108792 - protein, 266 aa, Arabidopsis thaliana; identical to SEQ ID NO: 97553
  peptide (1)..(266): Ceres Seq. ID no. 12738762

SEQ ID NO: 108793 - protein, 169 aa, Arabidopsis thaliana; identical to SEQ ID NO: 97554
  peptide (1)..(169): Ceres Seq. ID no. 12738763

SEQ ID NO: 108794 - DNA, 1879 bp, Arabidopsis thaliana; identical to SEQ ID NO: 97555
  misc_feature (1)..(1879): Ceres Seq. ID no. 12738832
  misc_feature (1)..(1879): Ortholog of  Ceres SEQ ID NO 15169072 as cited in SEQ ID NO 53955
  misc_feature (1)..(1879): Ortholog of  Ceres SEQ ID NO 15224912 as cited in SEQ ID NO 63475
  misc_feature (1)..(1879): Ortholog of  Ceres SEQ ID NO 13657460 as cited in SEQ ID NO 66115
  misc_feature (1)..(1879): Ortholog of  Ceres SEQ ID NO 13659394 as cited in SEQ ID NO 67049

SEQ ID NO: 108795 - protein, 573 aa, Arabidopsis thaliana; identical to SEQ ID NO: 97556
  peptide (1)..(573): Ceres Seq. ID no. 12738833

SEQ ID NO: 108796 - protein, 526 aa, Arabidopsis thaliana; identical to SEQ ID NO: 97557
  peptide (1)..(526): Ceres Seq. ID no. 12738834

SEQ ID NO: 108797 - protein, 519 aa, Arabidopsis thaliana; identical to SEQ ID NO: 97558
  peptide (1)..(519): Ceres Seq. ID no. 12738835

SEQ ID NO: 108798 - DNA, 1057 bp, Arabidopsis thaliana; identical to SEQ ID NO: 97559
  misc_feature (1)..(1057): Ceres Seq. ID no. 12738854
  misc_feature (1)..(1057): Ortholog of  Ceres SEQ ID NO 13581804 as cited in SEQ ID NO 51424
  misc_feature (1)..(1057): Ortholog of  Ceres SEQ ID NO 14310890 as cited in SEQ ID NO 54290
  misc_feature (1)..(1057): Ortholog of  Ceres SEQ ID NO 13663874 as cited in SEQ ID NO 67003

SEQ ID NO: 108799 - protein, 277 aa, Arabidopsis thaliana; identical to SEQ ID NO: 97560
  peptide (1)..(277): Ceres Seq. ID no. 12738855

SEQ ID NO: 108800 - protein, 230 aa, Arabidopsis thaliana; identical to SEQ ID NO: 44274
  peptide (1)..(230): Ceres Seq. ID no. 12738856

SEQ ID NO: 108801 - DNA, 1424 bp, Arabidopsis thaliana; identical to SEQ ID NO: 97562
  misc_feature (1)..(1424): Ceres Seq. ID no. 12738861
  misc_feature (1)..(1424): Ortholog of  Ceres SEQ ID NO 13493536 as cited in SEQ ID NO 58515
  misc_feature (1)..(1424): Ortholog of  Ceres SEQ ID NO 15225741 as cited in SEQ ID NO 59606
  misc_feature (1)..(1424): Ortholog of  Ceres SEQ ID NO 12618461 as cited in SEQ ID NO 64349

SEQ ID NO: 108802 - protein, 424 aa, Arabidopsis thaliana; identical to SEQ ID NO: 97563
  peptide (1)..(424): Ceres Seq. ID no. 12738862

SEQ ID NO: 108803 - protein, 285 aa, Arabidopsis thaliana; identical to SEQ ID NO: 97564
  peptide (1)..(285): Ceres Seq. ID no. 12738863

SEQ ID NO: 108804 - protein, 220 aa, Arabidopsis thaliana; identical to SEQ ID NO: 97565
  peptide (1)..(220): Ceres Seq. ID no. 12738864

SEQ ID NO: 108805 - DNA, 1504 bp, Arabidopsis thaliana; identical to SEQ ID NO: 97566
  misc_feature (1)..(1504): Ceres Seq. ID no. 12738900
  misc_feature (1)..(1504): Ortholog of  Ceres SEQ ID NO 14311938 as cited in SEQ ID NO 51615
  misc_feature (1)..(1504): Ortholog of  Ceres SEQ ID NO 14302059 as cited in SEQ ID NO 68322

SEQ ID NO: 108806 - protein, 319 aa, Arabidopsis thaliana; identical to SEQ ID NO: 21613
  peptide (1)..(319): Ceres Seq. ID no. 12738901

SEQ ID NO: 108807 - protein, 222 aa, Arabidopsis thaliana; identical to SEQ ID NO: 21614
  peptide (1)..(222): Ceres Seq. ID no. 12738902

SEQ ID NO: 108808 - protein, 196 aa, Arabidopsis thaliana; identical to SEQ ID NO: 21615
  peptide (1)..(196): Ceres Seq. ID no. 12738903

SEQ ID NO: 108809 - DNA, 1657 bp, Arabidopsis thaliana; identical to SEQ ID NO: 97570
  misc_feature (1)..(1657): Ceres Seq. ID no. 12738919
  misc_feature (1)..(1657): Ortholog of  Ceres SEQ ID NO 13654409 as cited in SEQ ID NO 68534

SEQ ID NO: 108810 - protein, 444 aa, Arabidopsis thaliana; identical to SEQ ID NO: 26953
  peptide (1)..(444): Ceres Seq. ID no. 12738920

SEQ ID NO: 108811 - protein, 412 aa, Arabidopsis thaliana; identical to SEQ ID NO: 26954
  peptide (1)..(412): Ceres Seq. ID no. 12738921

SEQ ID NO: 108812 - protein, 370 aa, Arabidopsis thaliana; identical to SEQ ID NO: 26955
  peptide (1)..(370): Ceres Seq. ID no. 12738922

SEQ ID NO: 108813 - DNA, 1302 bp, Arabidopsis thaliana; identical to SEQ ID NO: 97574
  misc_feature (1)..(1302): Ceres Seq. ID no. 12738937
  misc_feature (1)..(1302): Ortholog of  Ceres SEQ ID NO 14312293 as cited in SEQ ID NO 58744
  misc_feature (1)..(1302): Ortholog of  Ceres SEQ ID NO 15177596 as cited in SEQ ID NO 59731

SEQ ID NO: 108814 - protein, 291 aa, Arabidopsis thaliana; identical to SEQ ID NO: 86004
  peptide (1)..(291): Ceres Seq. ID no. 12738938

SEQ ID NO: 108815 - protein, 284 aa, Arabidopsis thaliana; identical to SEQ ID NO: 39455
  peptide (1)..(284): Ceres Seq. ID no. 12738939

SEQ ID NO: 108816 - protein, 283 aa, Arabidopsis thaliana; identical to SEQ ID NO: 39456
  peptide (1)..(283): Ceres Seq. ID no. 12738940

SEQ ID NO: 108817 - DNA, 1004 bp, Arabidopsis thaliana; identical to SEQ ID NO: 97578
  misc_feature (1)..(1004): Ceres Seq. ID no. 12738974
  misc_feature (1)..(1004): Ortholog of  Ceres SEQ ID NO 13647762 as cited in SEQ ID NO 20426

SEQ ID NO: 108818 - protein, 249 aa, Arabidopsis thaliana; identical to SEQ ID NO: 97579
  peptide (1)..(249): Ceres Seq. ID no. 12738975

SEQ ID NO: 108819 - protein, 248 aa, Arabidopsis thaliana; identical to SEQ ID NO: 97580
  peptide (1)..(248): Ceres Seq. ID no. 12738976

SEQ ID NO: 108820 - protein, 148 aa, Arabidopsis thaliana; identical to SEQ ID NO: 97581
  peptide (1)..(148): Ceres Seq. ID no. 12738977

SEQ ID NO: 108821 - DNA, 1554 bp, Arabidopsis thaliana; identical to SEQ ID NO: 97582
  misc_feature (1)..(1554): Ceres Seq. ID no. 12738991
  misc_feature (1)..(1554): Ortholog of  Ceres SEQ ID NO 14315346 as cited in SEQ ID NO 53970

SEQ ID NO: 108822 - protein, 472 aa, Arabidopsis thaliana; identical to SEQ ID NO: 97583
  peptide (1)..(472): Ceres Seq. ID no. 12738992

SEQ ID NO: 108823 - protein, 381 aa, Arabidopsis thaliana; identical to SEQ ID NO: 97584
  peptide (1)..(381): Ceres Seq. ID no. 12738993

SEQ ID NO: 108824 - protein, 341 aa, Arabidopsis thaliana; identical to SEQ ID NO: 97585
  peptide (1)..(341): Ceres Seq. ID no. 12738994

SEQ ID NO: 108825 - DNA, 2234 bp, Arabidopsis thaliana; identical to SEQ ID NO: 97586
  misc_feature (1)..(2234): Ceres Seq. ID no. 12738995
  misc_feature (1)..(2234): Ortholog of  Ceres SEQ ID NO 13590691 as cited in SEQ ID NO 66290

SEQ ID NO: 108826 - protein, 610 aa, Arabidopsis thaliana; identical to SEQ ID NO: 97587
  peptide (1)..(610): Ceres Seq. ID no. 12738996

SEQ ID NO: 108827 - protein, 446 aa, Arabidopsis thaliana; identical to SEQ ID NO: 97588
  peptide (1)..(446): Ceres Seq. ID no. 12738997

SEQ ID NO: 108828 - protein, 395 aa, Arabidopsis thaliana; identical to SEQ ID NO: 97589
  peptide (1)..(395): Ceres Seq. ID no. 12738998

SEQ ID NO: 108829 - DNA, 585 bp, Arabidopsis thaliana; identical to SEQ ID NO: 97590
  misc_feature (1)..(585): Ceres Seq. ID no. 12739040
  misc_feature (1)..(585): Ortholog of  Ceres SEQ ID NO 14311557 as cited in SEQ ID NO 51432
  misc_feature (1)..(585): Ortholog of  Ceres SEQ ID NO 13598075 as cited in SEQ ID NO 67351

SEQ ID NO: 108830 - protein, 128 aa, Arabidopsis thaliana; identical to SEQ ID NO: 97591
  peptide (1)..(128): Ceres Seq. ID no. 12739041
  misc_feature (26)..(26): Xaa is any aa, unknown or other
  misc_feature (101)..(101): Xaa is any aa, unknown or other

SEQ ID NO: 108831 - protein, 121 aa, Arabidopsis thaliana; identical to SEQ ID NO: 97592
  peptide (1)..(121): Ceres Seq. ID no. 12739042
  misc_feature (19)..(19): Xaa is any aa, unknown or other
  misc_feature (94)..(94): Xaa is any aa, unknown or other

SEQ ID NO: 108832 - protein, 91 aa, Arabidopsis thaliana; identical to SEQ ID NO: 97593
  peptide (1)..(91): Ceres Seq. ID no. 12739043
  misc_feature (64)..(64): Xaa is any aa, unknown or other

SEQ ID NO: 108833 - DNA, 762 bp, Arabidopsis thaliana; identical to SEQ ID NO: 97594
  misc_feature (1)..(762): Ceres Seq. ID no. 12739174
  misc_feature (1)..(762): Ortholog of  Ceres SEQ ID NO 15179194 as cited in SEQ ID NO 0

SEQ ID NO: 108834 - protein, 198 aa, Arabidopsis thaliana; identical to SEQ ID NO: 36038
  peptide (1)..(198): Ceres Seq. ID no. 12739175

SEQ ID NO: 108835 - protein, 181 aa, Arabidopsis thaliana; identical to SEQ ID NO: 36039
  peptide (1)..(181): Ceres Seq. ID no. 12739176

SEQ ID NO: 108836 - protein, 177 aa, Arabidopsis thaliana; identical to SEQ ID NO: 36040
  peptide (1)..(177): Ceres Seq. ID no. 12739177

SEQ ID NO: 108837 - DNA, 1027 bp, Arabidopsis thaliana; identical to SEQ ID NO: 97598
  misc_feature (1)..(1027): Ceres Seq. ID no. 12739208
  misc_feature (1)..(1027): Ortholog of  Ceres SEQ ID NO 13595072 as cited in SEQ ID NO 55971

SEQ ID NO: 108838 - protein, 267 aa, Arabidopsis thaliana; identical to SEQ ID NO: 21212
  peptide (1)..(267): Ceres Seq. ID no. 12739209

SEQ ID NO: 108839 - protein, 262 aa, Arabidopsis thaliana; identical to SEQ ID NO: 21213
  peptide (1)..(262): Ceres Seq. ID no. 12739210

SEQ ID NO: 108840 - protein, 233 aa, Arabidopsis thaliana; identical to SEQ ID NO: 21214
  peptide (1)..(233): Ceres Seq. ID no. 12739211

SEQ ID NO: 108841 - DNA, 2374 bp, Arabidopsis thaliana; identical to SEQ ID NO: 97602
  misc_feature (1)..(2374): Ceres Seq. ID no. 12739212
  misc_feature (1)..(2374): Ortholog of  Ceres SEQ ID NO 13663839 as cited in SEQ ID NO 60834
  misc_feature (1)..(2374): Ortholog of  Ceres SEQ ID NO 14313284 as cited in SEQ ID NO 67146
  misc_feature (1)..(2374): Ortholog of  Ceres SEQ ID NO 14308925 as cited in SEQ ID NO 0

SEQ ID NO: 108842 - protein, 699 aa, Arabidopsis thaliana; identical to SEQ ID NO: 49702
  peptide (1)..(699): Ceres Seq. ID no. 12739213

SEQ ID NO: 108843 - protein, 615 aa, Arabidopsis thaliana; identical to SEQ ID NO: 49703
  peptide (1)..(615): Ceres Seq. ID no. 12739214

SEQ ID NO: 108844 - protein, 594 aa, Arabidopsis thaliana; identical to SEQ ID NO: 70018
  peptide (1)..(594): Ceres Seq. ID no. 12739215

SEQ ID NO: 108845 - DNA, 1601 bp, Arabidopsis thaliana; identical to SEQ ID NO: 97606
  misc_feature (1)..(1601): Ceres Seq. ID no. 12739224
  misc_feature (1)..(1601): Ortholog of  Ceres SEQ ID NO 14314896 as cited in SEQ ID NO 54010
  misc_feature (1)..(1601): Ortholog of  Ceres SEQ ID NO 14308813 as cited in SEQ ID NO 55485
  misc_feature (1)..(1601): Ortholog of  Ceres SEQ ID NO 13655744 as cited in SEQ ID NO 64032

SEQ ID NO: 108846 - protein, 470 aa, Arabidopsis thaliana; identical to SEQ ID NO: 40875
  peptide (1)..(470): Ceres Seq. ID no. 12739225

SEQ ID NO: 108847 - protein, 449 aa, Arabidopsis thaliana; identical to SEQ ID NO: 27284
  peptide (1)..(449): Ceres Seq. ID no. 12739226

SEQ ID NO: 108848 - protein, 401 aa, Arabidopsis thaliana; identical to SEQ ID NO: 21437
  peptide (1)..(401): Ceres Seq. ID no. 12739227

SEQ ID NO: 108849 - DNA, 1143 bp, Arabidopsis thaliana; identical to SEQ ID NO: 97610
  misc_feature (1)..(1143): Ceres Seq. ID no. 12782023
  misc_feature (1)..(1143): Ortholog of  Ceres SEQ ID NO 13593831 as cited in SEQ ID NO 53828

SEQ ID NO: 108850 - protein, 252 aa, Arabidopsis thaliana; identical to SEQ ID NO: 97611
  peptide (1)..(252): Ceres Seq. ID no. 12782024

SEQ ID NO: 108851 - protein, 179 aa, Arabidopsis thaliana; identical to SEQ ID NO: 97612
  peptide (1)..(179): Ceres Seq. ID no. 12782025

SEQ ID NO: 108852 - protein, 171 aa, Arabidopsis thaliana; identical to SEQ ID NO: 97613
  peptide (1)..(171): Ceres Seq. ID no. 12782026

SEQ ID NO: 108853 - DNA, 1516 bp, Arabidopsis thaliana; identical to SEQ ID NO: 97614
  misc_feature (1)..(1516): Ceres Seq. ID no. 13486664
  misc_feature (1)..(1516): Ortholog of  Ceres SEQ ID NO 13599602 as cited in SEQ ID NO 0

SEQ ID NO: 108854 - protein, 414 aa, Arabidopsis thaliana; identical to SEQ ID NO: 29323
  peptide (1)..(414): Ceres Seq. ID no. 13486665

SEQ ID NO: 108855 - protein, 345 aa, Arabidopsis thaliana; identical to SEQ ID NO: 29324
  peptide (1)..(345): Ceres Seq. ID no. 13486666

SEQ ID NO: 108856 - protein, 291 aa, Arabidopsis thaliana; identical to SEQ ID NO: 29325
  peptide (1)..(291): Ceres Seq. ID no. 13486667

SEQ ID NO: 108857 - DNA, 1238 bp, Arabidopsis thaliana; identical to SEQ ID NO: 97618
  misc_feature (1)..(1238): Ceres Seq. ID no. 13486786
  misc_feature (1)..(1238): Ortholog of  Ceres SEQ ID NO 13595688 as cited in SEQ ID NO 54342
  misc_feature (1)..(1238): Ortholog of  Ceres SEQ ID NO 13595240 as cited in SEQ ID NO 56316
  misc_feature (1)..(1238): Ortholog of  Ceres SEQ ID NO 15168425 as cited in SEQ ID NO 57370

SEQ ID NO: 108858 - protein, 331 aa, Arabidopsis thaliana; identical to SEQ ID NO: 97619
  peptide (1)..(331): Ceres Seq. ID no. 13486787

SEQ ID NO: 108859 - protein, 307 aa, Arabidopsis thaliana; identical to SEQ ID NO: 40157
  peptide (1)..(307): Ceres Seq. ID no. 13486788

SEQ ID NO: 108860 - protein, 260 aa, Arabidopsis thaliana; identical to SEQ ID NO: 23964
  peptide (1)..(260): Ceres Seq. ID no. 13486789

SEQ ID NO: 108861 - DNA, 1302 bp, Arabidopsis thaliana; identical to SEQ ID NO: 97622
  misc_feature (1)..(1302): Ceres Seq. ID no. 13486884
  misc_feature (1)..(1302): Ortholog of  Ceres SEQ ID NO 13596780 as cited in SEQ ID NO 62360

SEQ ID NO: 108862 - protein, 361 aa, Arabidopsis thaliana; identical to SEQ ID NO: 29321
  peptide (1)..(361): Ceres Seq. ID no. 13486885

SEQ ID NO: 108863 - DNA, 1012 bp, Arabidopsis thaliana; identical to SEQ ID NO: 97624
  misc_feature (1)..(1012): Ceres Seq. ID no. 13487008
  misc_feature (1)..(1012): Ortholog of  Ceres SEQ ID NO 14311713 as cited in SEQ ID NO 51356
  misc_feature (1)..(1012): Ortholog of  Ceres SEQ ID NO 14303126 as cited in SEQ ID NO 67219

SEQ ID NO: 108864 - protein, 252 aa, Arabidopsis thaliana; identical to SEQ ID NO: 37738
  peptide (1)..(252): Ceres Seq. ID no. 13487009

SEQ ID NO: 108865 - protein, 155 aa, Arabidopsis thaliana; identical to SEQ ID NO: 37739
  peptide (1)..(155): Ceres Seq. ID no. 13487010

SEQ ID NO: 108866 - DNA, 1296 bp, Arabidopsis thaliana; identical to SEQ ID NO: 97627
  misc_feature (1)..(1296): Ceres Seq. ID no. 13487147
  misc_feature (1)..(1296): Ortholog of  Ceres SEQ ID NO 14311683 as cited in SEQ ID NO 51263
  misc_feature (1)..(1296): Ortholog of  Ceres SEQ ID NO 15177862 as cited in SEQ ID NO 56033
  misc_feature (1)..(1296): Ortholog of  Ceres SEQ ID NO 13661430 as cited in SEQ ID NO 61258
  misc_feature (1)..(1296): Ortholog of  Ceres SEQ ID NO 13590940 as cited in SEQ ID NO 68653
  misc_feature (1)..(1296): Ortholog of  Ceres SEQ ID NO 15179001 as cited in SEQ ID NO 0
  misc_feature (1)..(1296): Ortholog of  Ceres SEQ ID NO 15180040 as cited in SEQ ID NO 0

SEQ ID NO: 108867 - protein, 314 aa, Arabidopsis thaliana; identical to SEQ ID NO: 97628
  peptide (1)..(314): Ceres Seq. ID no. 13487148

SEQ ID NO: 108868 - protein, 289 aa, Arabidopsis thaliana; identical to SEQ ID NO: 97629
  peptide (1)..(289): Ceres Seq. ID no. 13487149

SEQ ID NO: 108869 - protein, 171 aa, Arabidopsis thaliana; identical to SEQ ID NO: 28167
  peptide (1)..(171): Ceres Seq. ID no. 13487150

SEQ ID NO: 108870 - DNA, 1354 bp, Arabidopsis thaliana; identical to SEQ ID NO: 97631
  misc_feature (1)..(1354): Ceres Seq. ID no. 13487388
  misc_feature (1)..(1354): Ortholog of  Ceres SEQ ID NO 13596338 as cited in SEQ ID NO 68005

SEQ ID NO: 108871 - protein, 337 aa, Arabidopsis thaliana; identical to SEQ ID NO: 27546
  peptide (1)..(337): Ceres Seq. ID no. 13487389

SEQ ID NO: 108872 - protein, 255 aa, Arabidopsis thaliana; identical to SEQ ID NO: 27547
  peptide (1)..(255): Ceres Seq. ID no. 13487390

SEQ ID NO: 108873 - protein, 221 aa, Arabidopsis thaliana; identical to SEQ ID NO: 27548
  peptide (1)..(221): Ceres Seq. ID no. 13487391

SEQ ID NO: 108874 - DNA, 1141 bp, Arabidopsis thaliana; identical to SEQ ID NO: 97635
  misc_feature (1)..(1141): Ceres Seq. ID no. 13487506
  misc_feature (1)..(1141): Ortholog of  Ceres SEQ ID NO 14313955 as cited in SEQ ID NO 54407

SEQ ID NO: 108875 - protein, 309 aa, Arabidopsis thaliana; identical to SEQ ID NO: 34775
  peptide (1)..(309): Ceres Seq. ID no. 13487507

SEQ ID NO: 108876 - protein, 271 aa, Arabidopsis thaliana; identical to SEQ ID NO: 34776
  peptide (1)..(271): Ceres Seq. ID no. 13487508

SEQ ID NO: 108877 - protein, 187 aa, Arabidopsis thaliana; identical to SEQ ID NO: 34777
  peptide (1)..(187): Ceres Seq. ID no. 13487509

SEQ ID NO: 108878 - DNA, 1349 bp, Arabidopsis thaliana; identical to SEQ ID NO: 97639
  misc_feature (1)..(1349): Ceres Seq. ID no. 13487597
  misc_feature (1)..(1349): Ortholog of  Ceres SEQ ID NO 12784228 as cited in SEQ ID NO 66111

SEQ ID NO: 108879 - protein, 318 aa, Arabidopsis thaliana; identical to SEQ ID NO: 24974
  peptide (1)..(318): Ceres Seq. ID no. 13487598

SEQ ID NO: 108880 - protein, 274 aa, Arabidopsis thaliana; identical to SEQ ID NO: 24975
  peptide (1)..(274): Ceres Seq. ID no. 13487599

SEQ ID NO: 108881 - protein, 237 aa, Arabidopsis thaliana; identical to SEQ ID NO: 24976
  peptide (1)..(237): Ceres Seq. ID no. 13487600

SEQ ID NO: 108882 - DNA, 1297 bp, Arabidopsis thaliana; identical to SEQ ID NO: 97643
  misc_feature (1)..(1297): Ceres Seq. ID no. 13487658
  misc_feature (1)..(1297): Ortholog of  Ceres SEQ ID NO 15177750 as cited in SEQ ID NO 57772
  misc_feature (1)..(1297): Ortholog of  Ceres SEQ ID NO 13596581 as cited in SEQ ID NO 62420
  misc_feature (1)..(1297): Ortholog of  Ceres SEQ ID NO 13591273 as cited in SEQ ID NO 65904
  misc_feature (1)..(1297): Ortholog of  Ceres SEQ ID NO 13623086 as cited in SEQ ID NO 0

SEQ ID NO: 108883 - protein, 383 aa, Arabidopsis thaliana; identical to SEQ ID NO: 97644
  peptide (1)..(383): Ceres Seq. ID no. 13487659

SEQ ID NO: 108884 - protein, 379 aa, Arabidopsis thaliana; identical to SEQ ID NO: 22337
  peptide (1)..(379): Ceres Seq. ID no. 13487660

SEQ ID NO: 108885 - protein, 255 aa, Arabidopsis thaliana; identical to SEQ ID NO: 22338
  peptide (1)..(255): Ceres Seq. ID no. 13487661

SEQ ID NO: 108886 - DNA, 1788 bp, Arabidopsis thaliana; identical to SEQ ID NO: 97647
  misc_feature (1)..(1788): Ceres Seq. ID no. 13488442
  misc_feature (1)..(1788): Ortholog of  Ceres SEQ ID NO 15226950 as cited in SEQ ID NO 68649
  misc_feature (1)..(1788): Ortholog of  Ceres SEQ ID NO 13502947 as cited in SEQ ID NO 69257

SEQ ID NO: 108887 - protein, 547 aa, Arabidopsis thaliana; identical to SEQ ID NO: 97648
  peptide (1)..(547): Ceres Seq. ID no. 13488443

SEQ ID NO: 108888 - protein, 531 aa, Arabidopsis thaliana; identical to SEQ ID NO: 97649
  peptide (1)..(531): Ceres Seq. ID no. 13488444

SEQ ID NO: 108889 - protein, 436 aa, Arabidopsis thaliana; identical to SEQ ID NO: 97650
  peptide (1)..(436): Ceres Seq. ID no. 13488445

SEQ ID NO: 108890 - DNA, 1055 bp, Arabidopsis thaliana; identical to SEQ ID NO: 97651
  misc_feature (1)..(1055): Ceres Seq. ID no. 13488494
  misc_feature (1)..(1055): Ortholog of  Ceres SEQ ID NO 13581804 as cited in SEQ ID NO 51424
  misc_feature (1)..(1055): Ortholog of  Ceres SEQ ID NO 13663874 as cited in SEQ ID NO 67003

SEQ ID NO: 108891 - protein, 277 aa, Arabidopsis thaliana; identical to SEQ ID NO: 97560
  peptide (1)..(277): Ceres Seq. ID no. 13488495

SEQ ID NO: 108892 - protein, 230 aa, Arabidopsis thaliana; identical to SEQ ID NO: 44274
  peptide (1)..(230): Ceres Seq. ID no. 13488496

SEQ ID NO: 108893 - DNA, 928 bp, Arabidopsis thaliana; identical to SEQ ID NO: 97654
  misc_feature (1)..(928): Ceres Seq. ID no. 13489155
  misc_feature (1)..(928): Ortholog of  Ceres SEQ ID NO 13638849 as cited in SEQ ID NO 52046
  misc_feature (1)..(928): Ortholog of  Ceres SEQ ID NO 13599613 as cited in SEQ ID NO 0

SEQ ID NO: 108894 - protein, 272 aa, Arabidopsis thaliana; identical to SEQ ID NO: 97655
  peptide (1)..(272): Ceres Seq. ID no. 13489156

SEQ ID NO: 108895 - protein, 256 aa, Arabidopsis thaliana; identical to SEQ ID NO: 37348
  peptide (1)..(256): Ceres Seq. ID no. 13489157

SEQ ID NO: 108896 - protein, 234 aa, Arabidopsis thaliana; identical to SEQ ID NO: 37349
  peptide (1)..(234): Ceres Seq. ID no. 13489158

SEQ ID NO: 108897 - DNA, 1025 bp, Arabidopsis thaliana; identical to SEQ ID NO: 97658
  misc_feature (1)..(1025): Ceres Seq. ID no. 13489889
  misc_feature (1)..(1025): Ortholog of  Ceres SEQ ID NO 13656436 as cited in SEQ ID NO 69154

SEQ ID NO: 108898 - protein, 254 aa, Arabidopsis thaliana; identical to SEQ ID NO: 20797
  peptide (1)..(254): Ceres Seq. ID no. 13489890

SEQ ID NO: 108899 - protein, 216 aa, Arabidopsis thaliana; identical to SEQ ID NO: 20798
  peptide (1)..(216): Ceres Seq. ID no. 13489891

SEQ ID NO: 108900 - protein, 128 aa, Arabidopsis thaliana; identical to SEQ ID NO: 20799
  peptide (1)..(128): Ceres Seq. ID no. 13489892

SEQ ID NO: 108901 - DNA, 991 bp, Arabidopsis thaliana; identical to SEQ ID NO: 97662
  misc_feature (1)..(991): Ceres Seq. ID no. 13490309
  misc_feature (1)..(991): Ortholog of  Ceres SEQ ID NO 12557432 as cited in SEQ ID NO 92
  misc_feature (1)..(991): Ortholog of  Ceres SEQ ID NO 14315553 as cited in SEQ ID NO 60445
  misc_feature (1)..(991): Ortholog of  Ceres SEQ ID NO 15224319 as cited in SEQ ID NO 66044
  misc_feature (1)..(991): Ortholog of  Ceres SEQ ID NO 13598045 as cited in SEQ ID NO 66822

SEQ ID NO: 108902 - protein, 235 aa, Arabidopsis thaliana; identical to SEQ ID NO: 28105
  peptide (1)..(235): Ceres Seq. ID no. 13490310

SEQ ID NO: 108903 - protein, 157 aa, Arabidopsis thaliana; identical to SEQ ID NO: 28106
  peptide (1)..(157): Ceres Seq. ID no. 13490311

SEQ ID NO: 108904 - protein, 118 aa, Arabidopsis thaliana; identical to SEQ ID NO: 28107
  peptide (1)..(118): Ceres Seq. ID no. 13490312

SEQ ID NO: 108905 - DNA, 1708 bp, Arabidopsis thaliana; identical to SEQ ID NO: 97666
  misc_feature (1)..(1708): Ceres Seq. ID no. 13490417
  misc_feature (1)..(1708): Ortholog of  Ceres SEQ ID NO 15177320 as cited in SEQ ID NO 52645
  misc_feature (1)..(1708): Ortholog of  Ceres SEQ ID NO 15171359 as cited in SEQ ID NO 57279
  misc_feature (1)..(1708): Ortholog of  Ceres SEQ ID NO 14313840 as cited in SEQ ID NO 59568
  misc_feature (1)..(1708): Ortholog of  Ceres SEQ ID NO 15168502 as cited in SEQ ID NO 60095
  misc_feature (1)..(1708): Ortholog of  Ceres SEQ ID NO 13662245 as cited in SEQ ID NO 62708
  misc_feature (1)..(1708): Ortholog of  Ceres SEQ ID NO 14314084 as cited in SEQ ID NO 63256
  misc_feature (1)..(1708): Ortholog of  Ceres SEQ ID NO 15169466 as cited in SEQ ID NO 66135
  misc_feature (1)..(1708): Ortholog of  Ceres SEQ ID NO 14303091 as cited in SEQ ID NO 66369

SEQ ID NO: 108906 - protein, 496 aa, Arabidopsis thaliana; identical to SEQ ID NO: 97667
  peptide (1)..(496): Ceres Seq. ID no. 13490418

SEQ ID NO: 108907 - protein, 485 aa, Arabidopsis thaliana; identical to SEQ ID NO: 97668
  peptide (1)..(485): Ceres Seq. ID no. 13490419

SEQ ID NO: 108908 - protein, 329 aa, Arabidopsis thaliana; identical to SEQ ID NO: 97669
  peptide (1)..(329): Ceres Seq. ID no. 13490420

SEQ ID NO: 108909 - DNA, 1225 bp, Arabidopsis thaliana; identical to SEQ ID NO: 97670
  misc_feature (1)..(1225): Ceres Seq. ID no. 13490440
  misc_feature (1)..(1225): Ortholog of  Ceres SEQ ID NO 13593831 as cited in SEQ ID NO 53828

SEQ ID NO: 108910 - protein, 286 aa, Arabidopsis thaliana; identical to SEQ ID NO: 97671
  peptide (1)..(286): Ceres Seq. ID no. 13490441

SEQ ID NO: 108911 - protein, 214 aa, Arabidopsis thaliana; identical to SEQ ID NO: 27567
  peptide (1)..(214): Ceres Seq. ID no. 13490442

SEQ ID NO: 108912 - protein, 206 aa, Arabidopsis thaliana; identical to SEQ ID NO: 27568
  peptide (1)..(206): Ceres Seq. ID no. 13490443

SEQ ID NO: 108913 - DNA, 1624 bp, Arabidopsis thaliana; identical to SEQ ID NO: 97674
  misc_feature (1)..(1624): Ceres Seq. ID no. 13490713
  misc_feature (1)..(1624): Ortholog of  Ceres SEQ ID NO 13595999 as cited in SEQ ID NO 68173

SEQ ID NO: 108914 - protein, 375 aa, Arabidopsis thaliana; identical to SEQ ID NO: 97675
  peptide (1)..(375): Ceres Seq. ID no. 13490714

SEQ ID NO: 108915 - DNA, 1523 bp, Arabidopsis thaliana; identical to SEQ ID NO: 97676
  misc_feature (1)..(1523): Ceres Seq. ID no. 13490795
  misc_feature (1)..(1523): Ortholog of  Ceres SEQ ID NO 13662745 as cited in SEQ ID NO 66320
  misc_feature (1)..(1523): Ortholog of  Ceres SEQ ID NO 13660029 as cited in SEQ ID NO 67353

SEQ ID NO: 108916 - protein, 419 aa, Arabidopsis thaliana; identical to SEQ ID NO: 84568
  peptide (1)..(419): Ceres Seq. ID no. 13490796

SEQ ID NO: 108917 - protein, 310 aa, Arabidopsis thaliana; identical to SEQ ID NO: 84569
  peptide (1)..(310): Ceres Seq. ID no. 13490797

SEQ ID NO: 108918 - protein, 285 aa, Arabidopsis thaliana; identical to SEQ ID NO: 84570
  peptide (1)..(285): Ceres Seq. ID no. 13490798

SEQ ID NO: 108919 - DNA, 1359 bp, Arabidopsis thaliana; identical to SEQ ID NO: 97680
  misc_feature (1)..(1359): Ceres Seq. ID no. 13490986
  misc_feature (1)..(1359): Ortholog of  Ceres SEQ ID NO 15176835 as cited in SEQ ID NO 1046
  misc_feature (1)..(1359): Ortholog of  Ceres SEQ ID NO 14315403 as cited in SEQ ID NO 59259

SEQ ID NO: 108920 - protein, 346 aa, Arabidopsis thaliana; identical to SEQ ID NO: 22142
  peptide (1)..(346): Ceres Seq. ID no. 13490987

SEQ ID NO: 108921 - protein, 336 aa, Arabidopsis thaliana; identical to SEQ ID NO: 22143
  peptide (1)..(336): Ceres Seq. ID no. 13490988

SEQ ID NO: 108922 - DNA, 1854 bp, Arabidopsis thaliana; identical to SEQ ID NO: 97683
  misc_feature (1)..(1854): Ceres Seq. ID no. 13491356
  misc_feature (1)..(1854): Ortholog of  Ceres SEQ ID NO 15178131 as cited in SEQ ID NO 52639

SEQ ID NO: 108923 - protein, 478 aa, Arabidopsis thaliana; identical to SEQ ID NO: 97684
  peptide (1)..(478): Ceres Seq. ID no. 13491357

SEQ ID NO: 108924 - protein, 270 aa, Arabidopsis thaliana; identical to SEQ ID NO: 38381
  peptide (1)..(270): Ceres Seq. ID no. 13491358

SEQ ID NO: 108925 - DNA, 666 bp, Arabidopsis thaliana; identical to SEQ ID NO: 97686
  misc_feature (1)..(666): Ceres Seq. ID no. 13491394
  misc_feature (1)..(666): Ortholog of  Ceres SEQ ID NO 12610954 as cited in SEQ ID NO 55930
  misc_feature (1)..(666): Ortholog of  Ceres SEQ ID NO 12625335 as cited in SEQ ID NO 63326
  misc_feature (1)..(666): Ortholog of  Ceres SEQ ID NO 12566590 as cited in SEQ ID NO 0
  misc_feature (1)..(666): Ortholog of  Ceres SEQ ID NO 14305152 as cited in SEQ ID NO 0
  misc_feature (1)..(666): Ortholog of  Ceres SEQ ID NO 15179949 as cited in SEQ ID NO 0

SEQ ID NO: 108926 - protein, 162 aa, Arabidopsis thaliana; identical to SEQ ID NO: 81388
  peptide (1)..(162): Ceres Seq. ID no. 13491395

SEQ ID NO: 108927 - protein, 110 aa, Arabidopsis thaliana; identical to SEQ ID NO: 81389
  peptide (1)..(110): Ceres Seq. ID no. 13491396

SEQ ID NO: 108928 - DNA, 1209 bp, Arabidopsis thaliana; identical to SEQ ID NO: 97689
  misc_feature (1)..(1209): Ceres Seq. ID no. 13491420
  misc_feature (1)..(1209): Ortholog of  Ceres SEQ ID NO 12484482 as cited in SEQ ID NO 53324
  misc_feature (1)..(1209): Ortholog of  Ceres SEQ ID NO 15176234 as cited in SEQ ID NO 54949
  misc_feature (1)..(1209): Ortholog of  Ceres SEQ ID NO 14314507 as cited in SEQ ID NO 59337

SEQ ID NO: 108929 - protein, 328 aa, Arabidopsis thaliana; identical to SEQ ID NO: 36034
  peptide (1)..(328): Ceres Seq. ID no. 13491421

SEQ ID NO: 108930 - protein, 317 aa, Arabidopsis thaliana; identical to SEQ ID NO: 35542
  peptide (1)..(317): Ceres Seq. ID no. 13491422

SEQ ID NO: 108931 - protein, 211 aa, Arabidopsis thaliana; identical to SEQ ID NO: 24550
  peptide (1)..(211): Ceres Seq. ID no. 13491423

SEQ ID NO: 108932 - DNA, 1105 bp, Arabidopsis thaliana; identical to SEQ ID NO: 97693
  misc_feature (1)..(1105): Ceres Seq. ID no. 13492456
  misc_feature (1)..(1105): Ortholog of  Ceres SEQ ID NO 13593831 as cited in SEQ ID NO 53828

SEQ ID NO: 108933 - protein, 286 aa, Arabidopsis thaliana; identical to SEQ ID NO: 97694
  peptide (1)..(286): Ceres Seq. ID no. 13492457

SEQ ID NO: 108934 - protein, 214 aa, Arabidopsis thaliana; identical to SEQ ID NO: 97695
  peptide (1)..(214): Ceres Seq. ID no. 13492458

SEQ ID NO: 108935 - protein, 206 aa, Arabidopsis thaliana; identical to SEQ ID NO: 97696
  peptide (1)..(206): Ceres Seq. ID no. 13492459

SEQ ID NO: 108936 - DNA, 817 bp, Arabidopsis thaliana; identical to SEQ ID NO: 97697
  misc_feature (1)..(817): Ceres Seq. ID no. 13492627
  misc_feature (1)..(817): Ortholog of  Ceres SEQ ID NO 15173567 as cited in SEQ ID NO 57612
  misc_feature (1)..(817): Ortholog of  Ceres SEQ ID NO 12611396 as cited in SEQ ID NO 59809
  misc_feature (1)..(817): Ortholog of  Ceres SEQ ID NO 15178140 as cited in SEQ ID NO 0

SEQ ID NO: 108937 - protein, 168 aa, Arabidopsis thaliana; identical to SEQ ID NO: 28030
  peptide (1)..(168): Ceres Seq. ID no. 13492628

SEQ ID NO: 108938 - DNA, 1084 bp, Arabidopsis thaliana; identical to SEQ ID NO: 97699
  misc_feature (1)..(1084): Ceres Seq. ID no. 13492779
  misc_feature (1)..(1084): Ortholog of  Ceres SEQ ID NO 13658282 as cited in SEQ ID NO 66701

SEQ ID NO: 108939 - protein, 262 aa, Arabidopsis thaliana; identical to SEQ ID NO: 21933
  peptide (1)..(262): Ceres Seq. ID no. 13492780

SEQ ID NO: 108940 - protein, 239 aa, Arabidopsis thaliana; identical to SEQ ID NO: 21934
  peptide (1)..(239): Ceres Seq. ID no. 13492781

SEQ ID NO: 108941 - DNA, 836 bp, Arabidopsis thaliana; identical to SEQ ID NO: 97702
  misc_feature (1)..(836): Ceres Seq. ID no. 13493726
  misc_feature (1)..(836): Ortholog of  Ceres SEQ ID NO 15172913 as cited in SEQ ID NO 51824
  misc_feature (1)..(836): Ortholog of  Ceres SEQ ID NO 13654659 as cited in SEQ ID NO 61998

SEQ ID NO: 108942 - protein, 201 aa, Arabidopsis thaliana; identical to SEQ ID NO: 97703
  peptide (1)..(201): Ceres Seq. ID no. 13493727

SEQ ID NO: 108943 - protein, 181 aa, Arabidopsis thaliana; identical to SEQ ID NO: 97704
  peptide (1)..(181): Ceres Seq. ID no. 13493728

SEQ ID NO: 108944 - DNA, 1130 bp, Arabidopsis thaliana; identical to SEQ ID NO: 97705
  misc_feature (1)..(1130): Ceres Seq. ID no. 13494035
  misc_feature (1)..(1130): Ortholog of  Ceres SEQ ID NO 12609146 as cited in SEQ ID NO 52118
  misc_feature (1)..(1130): Ortholog of  Ceres SEQ ID NO 14303397 as cited in SEQ ID NO 54614
  misc_feature (1)..(1130): Ortholog of  Ceres SEQ ID NO 13594056 as cited in SEQ ID NO 55691
  misc_feature (1)..(1130): Ortholog of  Ceres SEQ ID NO 14314186 as cited in SEQ ID NO 57457
  misc_feature (1)..(1130): Ortholog of  Ceres SEQ ID NO 13638136 as cited in SEQ ID NO 58644
  misc_feature (1)..(1130): Ortholog of  Ceres SEQ ID NO 13596868 as cited in SEQ ID NO 62806
  misc_feature (1)..(1130): Ortholog of  Ceres SEQ ID NO 13595885 as cited in SEQ ID NO 69265
  misc_feature (1)..(1130): Ortholog of  Ceres SEQ ID NO 12566239 as cited in SEQ ID NO 0
  misc_feature (1)..(1130): Ortholog of  Ceres SEQ ID NO 13599119 as cited in SEQ ID NO 0
  misc_feature (1)..(1130): Ortholog of  Ceres SEQ ID NO 14308987 as cited in SEQ ID NO 0

SEQ ID NO: 108945 - protein, 289 aa, Arabidopsis thaliana; identical to SEQ ID NO: 40326
  peptide (1)..(289): Ceres Seq. ID no. 13494036

SEQ ID NO: 108946 - protein, 280 aa, Arabidopsis thaliana; identical to SEQ ID NO: 40327
  peptide (1)..(280): Ceres Seq. ID no. 13494037

SEQ ID NO: 108947 - protein, 254 aa, Arabidopsis thaliana; identical to SEQ ID NO: 40328
  peptide (1)..(254): Ceres Seq. ID no. 13494038

SEQ ID NO: 108948 - DNA, 1423 bp, Arabidopsis thaliana; identical to SEQ ID NO: 97709
  misc_feature (1)..(1423): Ceres Seq. ID no. 13494233
  misc_feature (1)..(1423): Ortholog of  Ceres SEQ ID NO 15168521 as cited in SEQ ID NO 58180

SEQ ID NO: 108949 - protein, 275 aa, Arabidopsis thaliana; identical to SEQ ID NO: 20921
  peptide (1)..(275): Ceres Seq. ID no. 13494234

SEQ ID NO: 108950 - protein, 271 aa, Arabidopsis thaliana; identical to SEQ ID NO: 20922
  peptide (1)..(271): Ceres Seq. ID no. 13494235

SEQ ID NO: 108951 - DNA, 1423 bp, Arabidopsis thaliana; identical to SEQ ID NO: 97712
  misc_feature (1)..(1423): Ceres Seq. ID no. 13494365
  misc_feature (1)..(1423): Ortholog of  Ceres SEQ ID NO 13654557 as cited in SEQ ID NO 68444

SEQ ID NO: 108952 - protein, 421 aa, Arabidopsis thaliana; identical to SEQ ID NO: 36165
  peptide (1)..(421): Ceres Seq. ID no. 13494366

SEQ ID NO: 108953 - protein, 407 aa, Arabidopsis thaliana; identical to SEQ ID NO: 36166
  peptide (1)..(407): Ceres Seq. ID no. 13494367

SEQ ID NO: 108954 - protein, 388 aa, Arabidopsis thaliana; identical to SEQ ID NO: 36167
  peptide (1)..(388): Ceres Seq. ID no. 13494368

SEQ ID NO: 108955 - DNA, 584 bp, Arabidopsis thaliana; identical to SEQ ID NO: 97716
  misc_feature (1)..(584): Ceres Seq. ID no. 13496727
  misc_feature (1)..(584): Ortholog of  Ceres SEQ ID NO 15169443 as cited in SEQ ID NO 58785

SEQ ID NO: 108956 - protein, 115 aa, Arabidopsis thaliana; identical to SEQ ID NO: 23308
  peptide (1)..(115): Ceres Seq. ID no. 13496728

SEQ ID NO: 108957 - DNA, 1067 bp, Arabidopsis thaliana; identical to SEQ ID NO: 97718
  misc_feature (1)..(1067): Ceres Seq. ID no. 13496733
  misc_feature (1)..(1067): Ortholog of  Ceres SEQ ID NO 15226473 as cited in SEQ ID NO 50919
  misc_feature (1)..(1067): Ortholog of  Ceres SEQ ID NO 13639704 as cited in SEQ ID NO 51325
  misc_feature (1)..(1067): Ortholog of  Ceres SEQ ID NO 13661747 as cited in SEQ ID NO 60578
  misc_feature (1)..(1067): Ortholog of  Ceres SEQ ID NO 13661672 as cited in SEQ ID NO 61462
  misc_feature (1)..(1067): Ortholog of  Ceres SEQ ID NO 13599646 as cited in SEQ ID NO 0

SEQ ID NO: 108958 - protein, 263 aa, Arabidopsis thaliana; identical to SEQ ID NO: 22602
  peptide (1)..(263): Ceres Seq. ID no. 13496734

SEQ ID NO: 108959 - DNA, 1038 bp, Arabidopsis thaliana; identical to SEQ ID NO: 97720
  misc_feature (1)..(1038): Ceres Seq. ID no. 13496750
  misc_feature (1)..(1038): Ortholog of  Ceres SEQ ID NO 15177067 as cited in SEQ ID NO 52085
  misc_feature (1)..(1038): Ortholog of  Ceres SEQ ID NO 14309480 as cited in SEQ ID NO 0
  misc_feature (1)..(1038): Ortholog of  Ceres SEQ ID NO 14312472 as cited in SEQ ID NO 0

SEQ ID NO: 108960 - protein, 269 aa, Arabidopsis thaliana; identical to SEQ ID NO: 36555
  peptide (1)..(269): Ceres Seq. ID no. 13496751

SEQ ID NO: 108961 - protein, 265 aa, Arabidopsis thaliana; identical to SEQ ID NO: 36556
  peptide (1)..(265): Ceres Seq. ID no. 13496752

SEQ ID NO: 108962 - protein, 259 aa, Arabidopsis thaliana; identical to SEQ ID NO: 36557
  peptide (1)..(259): Ceres Seq. ID no. 13496753

SEQ ID NO: 108963 - DNA, 880 bp, Arabidopsis thaliana; identical to SEQ ID NO: 97724
  misc_feature (1)..(880): Ceres Seq. ID no. 13499590
  misc_feature (1)..(880): Ortholog of  Ceres SEQ ID NO 12619999 as cited in SEQ ID NO 66123
  misc_feature (1)..(880): Ortholog of  Ceres SEQ ID NO 13656436 as cited in SEQ ID NO 69154

SEQ ID NO: 108964 - protein, 212 aa, Arabidopsis thaliana [sequence omitted]

SEQ ID NO: 108965 - protein, 123 aa, Arabidopsis thaliana; identical to SEQ ID NO: 26494
  peptide (1)..(123): Ceres Seq. ID no. 13499592

SEQ ID NO: 108966 - DNA, 1365 bp, Arabidopsis thaliana; identical to SEQ ID NO: 97727
  misc_feature (1)..(1365): Ceres Seq. ID no. 13503905
  misc_feature (1)..(1365): Ortholog of  Ceres SEQ ID NO 13598579 as cited in SEQ ID NO 65523

SEQ ID NO: 108967 - protein, 355 aa, Arabidopsis thaliana; identical to SEQ ID NO: 97728
  peptide (1)..(355): Ceres Seq. ID no. 13503906

SEQ ID NO: 108968 - protein, 298 aa, Arabidopsis thaliana; identical to SEQ ID NO: 97729
  peptide (1)..(298): Ceres Seq. ID no. 13503907

SEQ ID NO: 108969 - DNA, 1173 bp, Arabidopsis thaliana; identical to SEQ ID NO: 97730
  misc_feature (1)..(1173): Ceres Seq. ID no. 13504705
  misc_feature (1)..(1173): Ortholog of  Ceres SEQ ID NO 13582332 as cited in SEQ ID NO 59890
  misc_feature (1)..(1173): Ortholog of  Ceres SEQ ID NO 13598278 as cited in SEQ ID NO 68456

SEQ ID NO: 108970 - protein, 390 aa, Arabidopsis thaliana; identical to SEQ ID NO: 97731
  peptide (1)..(390): Ceres Seq. ID no. 15222821

SEQ ID NO: 108971 - DNA, 2550 bp, Arabidopsis thaliana; identical to SEQ ID NO: 97732
  misc_feature (1)..(2550): Ceres Seq. ID no. 13504808
  misc_feature (1)..(2550): Ortholog of  Ceres SEQ ID NO 13593855 as cited in SEQ ID NO 53838
  misc_feature (1)..(2550): Ortholog of  Ceres SEQ ID NO 14302247 as cited in SEQ ID NO 62154
  misc_feature (1)..(2550): Ortholog of  Ceres SEQ ID NO 13539874 as cited in SEQ ID NO 64069
  misc_feature (1)..(2550): Ortholog of  Ceres SEQ ID NO 15224896 as cited in SEQ ID NO 0

SEQ ID NO: 108972 - protein, 818 aa, Arabidopsis thaliana; identical to SEQ ID NO: 97733
  peptide (1)..(818): Ceres Seq. ID no. 13504809

SEQ ID NO: 108973 - protein, 795 aa, Arabidopsis thaliana; identical to SEQ ID NO: 97734
  peptide (1)..(795): Ceres Seq. ID no. 13504810

SEQ ID NO: 108974 - protein, 793 aa, Arabidopsis thaliana; identical to SEQ ID NO: 97735
  peptide (1)..(793): Ceres Seq. ID no. 13504811

SEQ ID NO: 108975 - DNA, 1821 bp, Arabidopsis thaliana; identical to SEQ ID NO: 97736
  misc_feature (1)..(1821): Ceres Seq. ID no. 13504843
  misc_feature (1)..(1821): Ortholog of  Ceres SEQ ID NO 13582619 as cited in SEQ ID NO 56520
  misc_feature (1)..(1821): Ortholog of  Ceres SEQ ID NO 13660872 as cited in SEQ ID NO 60830

SEQ ID NO: 108976 - protein, 451 aa, Arabidopsis thaliana; identical to SEQ ID NO: 97737
  peptide (1)..(451): Ceres Seq. ID no. 13504844

SEQ ID NO: 108977 - protein, 447 aa, Arabidopsis thaliana; identical to SEQ ID NO: 97738
  peptide (1)..(447): Ceres Seq. ID no. 13504845

SEQ ID NO: 108978 - protein, 365 aa, Arabidopsis thaliana; identical to SEQ ID NO: 97739
  peptide (1)..(365): Ceres Seq. ID no. 13504846

SEQ ID NO: 108979 - DNA, 1568 bp, Arabidopsis thaliana; identical to SEQ ID NO: 97740
  misc_feature (1)..(1568): Ceres Seq. ID no. 13504989
  misc_feature (1)..(1568): Ortholog of  Ceres SEQ ID NO 14302287 as cited in SEQ ID NO 68134
  misc_feature (1)..(1568): Ortholog of  Ceres SEQ ID NO 14309328 as cited in SEQ ID NO 0

SEQ ID NO: 108980 - protein, 386 aa, Arabidopsis thaliana; identical to SEQ ID NO: 25082
  peptide (1)..(386): Ceres Seq. ID no. 13504990

SEQ ID NO: 108981 - protein, 381 aa, Arabidopsis thaliana; identical to SEQ ID NO: 25083
  peptide (1)..(381): Ceres Seq. ID no. 13504991

SEQ ID NO: 108982 - protein, 375 aa, Arabidopsis thaliana; identical to SEQ ID NO: 25084
  peptide (1)..(375): Ceres Seq. ID no. 13504992

SEQ ID NO: 108983 - DNA, 1051 bp, Arabidopsis thaliana; identical to SEQ ID NO: 97744
  misc_feature (1)..(1051): Ceres Seq. ID no. 13505015
  misc_feature (1)..(1051): Ortholog of  Ceres SEQ ID NO 13595072 as cited in SEQ ID NO 55971

SEQ ID NO: 108984 - protein, 267 aa, Arabidopsis thaliana; identical to SEQ ID NO: 22639
  peptide (1)..(267): Ceres Seq. ID no. 13505016

SEQ ID NO: 108985 - protein, 262 aa, Arabidopsis thaliana; identical to SEQ ID NO: 22640
  peptide (1)..(262): Ceres Seq. ID no. 13505017

SEQ ID NO: 108986 - protein, 233 aa, Arabidopsis thaliana; identical to SEQ ID NO: 21214
  peptide (1)..(233): Ceres Seq. ID no. 13505018

SEQ ID NO: 108987 - DNA, 1597 bp, Arabidopsis thaliana; identical to SEQ ID NO: 97748
  misc_feature (1)..(1597): Ceres Seq. ID no. 13508963
  misc_feature (1)..(1597): Ortholog of  Ceres SEQ ID NO 13597334 as cited in SEQ ID NO 64244
  misc_feature (1)..(1597): Ortholog of  Ceres SEQ ID NO 14303165 as cited in SEQ ID NO 65181
  misc_feature (1)..(1597): Ortholog of  Ceres SEQ ID NO 15224550 as cited in SEQ ID NO 0

SEQ ID NO: 108988 - protein, 420 aa, Arabidopsis thaliana; identical to SEQ ID NO: 97749
  peptide (1)..(420): Ceres Seq. ID no. 13508964

SEQ ID NO: 108989 - protein, 399 aa, Arabidopsis thaliana; identical to SEQ ID NO: 97750
  peptide (1)..(399): Ceres Seq. ID no. 13508965

SEQ ID NO: 108990 - protein, 295 aa, Arabidopsis thaliana; identical to SEQ ID NO: 97751
  peptide (1)..(295): Ceres Seq. ID no. 13508966

SEQ ID NO: 108991 - DNA, 1291 bp, Arabidopsis thaliana; identical to SEQ ID NO: 97752
  misc_feature (1)..(1291): Ceres Seq. ID no. 13509025
  misc_feature (1)..(1291): Ortholog of  Ceres SEQ ID NO 14312208 as cited in SEQ ID NO 54845
  misc_feature (1)..(1291): Ortholog of  Ceres SEQ ID NO 13597613 as cited in SEQ ID NO 65334
  misc_feature (1)..(1291): Ortholog of  Ceres SEQ ID NO 14303664 as cited in SEQ ID NO 65892
  misc_feature (1)..(1291): Ortholog of  Ceres SEQ ID NO 15178832 as cited in SEQ ID NO 0

SEQ ID NO: 108992 - protein, 315 aa, Arabidopsis thaliana; identical to SEQ ID NO: 42008
  peptide (1)..(315): Ceres Seq. ID no. 13509026

SEQ ID NO: 108993 - protein, 303 aa, Arabidopsis thaliana; identical to SEQ ID NO: 42009
  peptide (1)..(303): Ceres Seq. ID no. 13509027

SEQ ID NO: 108994 - protein, 276 aa, Arabidopsis thaliana; identical to SEQ ID NO: 42010
  peptide (1)..(276): Ceres Seq. ID no. 13509028

SEQ ID NO: 108995 - DNA, 1037 bp, Arabidopsis thaliana; identical to SEQ ID NO: 97756
  misc_feature (1)..(1037): Ceres Seq. ID no. 13509334
  misc_feature (1)..(1037): Ortholog of  Ceres SEQ ID NO 13595497 as cited in SEQ ID NO 51127
  misc_feature (1031)..(1031): n is a, c, t, g, unknown, or other

SEQ ID NO: 108996 - protein, 206 aa, Arabidopsis thaliana; identical to SEQ ID NO: 44156
  peptide (1)..(206): Ceres Seq. ID no. 13509335

SEQ ID NO: 108997 - protein, 176 aa, Arabidopsis thaliana; identical to SEQ ID NO: 44157
  peptide (1)..(176): Ceres Seq. ID no. 13509336

SEQ ID NO: 108998 - protein, 158 aa, Arabidopsis thaliana; identical to SEQ ID NO: 44158
  peptide (1)..(158): Ceres Seq. ID no. 13509337

SEQ ID NO: 108999 - DNA, 3067 bp, Arabidopsis thaliana; identical to SEQ ID NO: 97760
  misc_feature (1)..(3067): Ceres Seq. ID no. 13509389
  misc_feature (1)..(3067): Ortholog of  Ceres SEQ ID NO 14303366 as cited in SEQ ID NO 54418
  misc_feature (1)..(3067): Ortholog of  Ceres SEQ ID NO 13503610 as cited in SEQ ID NO 62416
  misc_feature (1)..(3067): Ortholog of  Ceres SEQ ID NO 13657610 as cited in SEQ ID NO 66165
  misc_feature (1)..(3067): Ortholog of  Ceres SEQ ID NO 13598312 as cited in SEQ ID NO 68448
  misc_feature (1)..(3067): Ortholog of  Ceres SEQ ID NO 13596100 as cited in SEQ ID NO 68573

SEQ ID NO: 109000 - protein, 466 aa, Arabidopsis thaliana; identical to SEQ ID NO: 97761
  peptide (1)..(466): Ceres Seq. ID no. 13509390

SEQ ID NO: 109001 - protein, 421 aa, Arabidopsis thaliana; identical to SEQ ID NO: 97762
  peptide (1)..(421): Ceres Seq. ID no. 13509391

SEQ ID NO: 109002 - protein, 342 aa, Arabidopsis thaliana; identical to SEQ ID NO: 97763
  peptide (1)..(342): Ceres Seq. ID no. 13509392

SEQ ID NO: 109003 - DNA, 1423 bp, Arabidopsis thaliana; identical to SEQ ID NO: 97764
  misc_feature (1)..(1423): Ceres Seq. ID no. 13509490
  misc_feature (1)..(1423): Ortholog of  Ceres SEQ ID NO 15171386 as cited in SEQ ID NO 51479

SEQ ID NO: 109004 - protein, 359 aa, Arabidopsis thaliana; identical to SEQ ID NO: 74454
  peptide (1)..(359): Ceres Seq. ID no. 13509491

SEQ ID NO: 109005 - protein, 336 aa, Arabidopsis thaliana; identical to SEQ ID NO: 74455
  peptide (1)..(336): Ceres Seq. ID no. 13509492

SEQ ID NO: 109006 - protein, 262 aa, Arabidopsis thaliana; identical to SEQ ID NO: 74456
  peptide (1)..(262): Ceres Seq. ID no. 13509493

SEQ ID NO: 109007 - DNA, 1416 bp, Arabidopsis thaliana; identical to SEQ ID NO: 97768
  misc_feature (1)..(1416): Ceres Seq. ID no. 13509655
  misc_feature (1)..(1416): Ortholog of  Ceres SEQ ID NO 13596244 as cited in SEQ ID NO 69307

SEQ ID NO: 109008 - protein, 384 aa, Arabidopsis thaliana; identical to SEQ ID NO: 97769
  peptide (1)..(384): Ceres Seq. ID no. 13509656

SEQ ID NO: 109009 - protein, 288 aa, Arabidopsis thaliana; identical to SEQ ID NO: 44477
  peptide (1)..(288): Ceres Seq. ID no. 13509657

SEQ ID NO: 109010 - protein, 273 aa, Arabidopsis thaliana; identical to SEQ ID NO: 44478
  peptide (1)..(273): Ceres Seq. ID no. 13509658

SEQ ID NO: 109011 - DNA, 1581 bp, Arabidopsis thaliana; identical to SEQ ID NO: 97772
  misc_feature (1)..(1581): Ceres Seq. ID no. 13509924
  misc_feature (1)..(1581): Ortholog of  Ceres SEQ ID NO 14307156 as cited in SEQ ID NO 54069
  misc_feature (1)..(1581): Ortholog of  Ceres SEQ ID NO 13599044 as cited in SEQ ID NO 0

SEQ ID NO: 109012 - protein, 478 aa, Arabidopsis thaliana; identical to SEQ ID NO: 97773
  peptide (1)..(478): Ceres Seq. ID no. 13509925

SEQ ID NO: 109013 - protein, 467 aa, Arabidopsis thaliana; identical to SEQ ID NO: 97774
  peptide (1)..(467): Ceres Seq. ID no. 13509926

SEQ ID NO: 109014 - protein, 428 aa, Arabidopsis thaliana; identical to SEQ ID NO: 97775
  peptide (1)..(428): Ceres Seq. ID no. 13509927

SEQ ID NO: 109015 - DNA, 1168 bp, Arabidopsis thaliana; identical to SEQ ID NO: 97776
  misc_feature (1)..(1168): Ceres Seq. ID no. 13575737
  misc_feature (1)..(1168): Ortholog of  Ceres SEQ ID NO 13594604 as cited in SEQ ID NO 52106

SEQ ID NO: 109016 - protein, 317 aa, Arabidopsis thaliana; identical to SEQ ID NO: 97777
  peptide (1)..(317): Ceres Seq. ID no. 13575738

SEQ ID NO: 109017 - protein, 289 aa, Arabidopsis thaliana; identical to SEQ ID NO: 97778
  peptide (1)..(289): Ceres Seq. ID no. 13575739

SEQ ID NO: 109018 - DNA, 2823 bp, Arabidopsis thaliana; identical to SEQ ID NO: 97779
  misc_feature (1)..(2823): Ceres Seq. ID no. 13575926
  misc_feature (1)..(2823): Ortholog of  Ceres SEQ ID NO 13656177 as cited in SEQ ID NO 64997

SEQ ID NO: 109019 - protein, 785 aa, Arabidopsis thaliana; identical to SEQ ID NO: 97780
  peptide (1)..(785): Ceres Seq. ID no. 13575927

SEQ ID NO: 109020 - protein, 748 aa, Arabidopsis thaliana; identical to SEQ ID NO: 97781
  peptide (1)..(748): Ceres Seq. ID no. 13575928

SEQ ID NO: 109021 - protein, 485 aa, Arabidopsis thaliana; identical to SEQ ID NO: 97782
  peptide (1)..(485): Ceres Seq. ID no. 13575929

SEQ ID NO: 109022 - DNA, 1521 bp, Arabidopsis thaliana; identical to SEQ ID NO: 97783
  misc_feature (1)..(1521): Ceres Seq. ID no. 13576051
  misc_feature (1)..(1521): Ortholog of  Ceres SEQ ID NO 14309870 as cited in SEQ ID NO 20595

SEQ ID NO: 109023 - protein, 506 aa, Arabidopsis thaliana; identical to SEQ ID NO: 97784
  peptide (1)..(506): Ceres Seq. ID no. 13576052

SEQ ID NO: 109024 - protein, 493 aa, Arabidopsis thaliana; identical to SEQ ID NO: 97785
  peptide (1)..(493): Ceres Seq. ID no. 13576053

SEQ ID NO: 109025 - protein, 374 aa, Arabidopsis thaliana; identical to SEQ ID NO: 97786
  peptide (1)..(374): Ceres Seq. ID no. 13576054

SEQ ID NO: 109026 - DNA, 1597 bp, Arabidopsis thaliana; identical to SEQ ID NO: 97787
  misc_feature (1)..(1597): Ceres Seq. ID no. 13576067
  misc_feature (1)..(1597): Ortholog of  Ceres SEQ ID NO 13654989 as cited in SEQ ID NO 63117
  misc_feature (1)..(1597): Ortholog of  Ceres SEQ ID NO 13584744 as cited in SEQ ID NO 69137

SEQ ID NO: 109027 - protein, 509 aa, Arabidopsis thaliana; identical to SEQ ID NO: 97788
  peptide (1)..(509): Ceres Seq. ID no. 13576068

SEQ ID NO: 109028 - protein, 274 aa, Arabidopsis thaliana; identical to SEQ ID NO: 97789
  peptide (1)..(274): Ceres Seq. ID no. 13576069

SEQ ID NO: 109029 - protein, 268 aa, Arabidopsis thaliana; identical to SEQ ID NO: 97790
  peptide (1)..(268): Ceres Seq. ID no. 13576070

SEQ ID NO: 109030 - DNA, 1789 bp, Arabidopsis thaliana; identical to SEQ ID NO: 97791
  misc_feature (1)..(1789): Ceres Seq. ID no. 13576087
  misc_feature (1)..(1789): Ortholog of  Ceres SEQ ID NO 14310016 as cited in SEQ ID NO 20753

SEQ ID NO: 109031 - protein, 473 aa, Arabidopsis thaliana; identical to SEQ ID NO: 76118
  peptide (1)..(473): Ceres Seq. ID no. 13576088

SEQ ID NO: 109032 - DNA, 2040 bp, Arabidopsis thaliana; identical to SEQ ID NO: 97793
  misc_feature (1)..(2040): Ceres Seq. ID no. 13576137
  misc_feature (1)..(2040): Ortholog of  Ceres SEQ ID NO 13596392 as cited in SEQ ID NO 62136
  misc_feature (1)..(2040): Ortholog of  Ceres SEQ ID NO 15226223 as cited in SEQ ID NO 65500
  misc_feature (1)..(2040): Ortholog of  Ceres SEQ ID NO 13596394 as cited in SEQ ID NO 68561

SEQ ID NO: 109033 - protein, 484 aa, Arabidopsis thaliana; identical to SEQ ID NO: 76043
  peptide (1)..(484): Ceres Seq. ID no. 13576138

SEQ ID NO: 109034 - protein, 391 aa, Arabidopsis thaliana; identical to SEQ ID NO: 76044
  peptide (1)..(391): Ceres Seq. ID no. 13576139

SEQ ID NO: 109035 - protein, 356 aa, Arabidopsis thaliana; identical to SEQ ID NO: 76045
  peptide (1)..(356): Ceres Seq. ID no. 13576140

SEQ ID NO: 109036 - DNA, 3545 bp, Arabidopsis thaliana; identical to SEQ ID NO: 97797
  misc_feature (1)..(3545): Ceres Seq. ID no. 13576172
  misc_feature (1)..(3545): Ortholog of  Ceres SEQ ID NO 13593889 as cited in SEQ ID NO 53305
  misc_feature (1)..(3545): Ortholog of  Ceres SEQ ID NO 13581959 as cited in SEQ ID NO 56156

SEQ ID NO: 109037 - protein, 992 aa, Arabidopsis thaliana; identical to SEQ ID NO: 97798
  peptide (1)..(992): Ceres Seq. ID no. 13576173

SEQ ID NO: 109038 - protein, 990 aa, Arabidopsis thaliana; identical to SEQ ID NO: 97799
  peptide (1)..(990): Ceres Seq. ID no. 13576174

SEQ ID NO: 109039 - protein, 988 aa, Arabidopsis thaliana; identical to SEQ ID NO: 97800
  peptide (1)..(988): Ceres Seq. ID no. 13576175

SEQ ID NO: 109040 - DNA, 1901 bp, Arabidopsis thaliana; identical to SEQ ID NO: 97801
  misc_feature (1)..(1901): Ceres Seq. ID no. 13576325
  misc_feature (1)..(1901): Ortholog of  Ceres SEQ ID NO 14313784 as cited in SEQ ID NO 54208

SEQ ID NO: 109041 - protein, 591 aa, Arabidopsis thaliana; identical to SEQ ID NO: 97802
  peptide (1)..(591): Ceres Seq. ID no. 13576326

SEQ ID NO: 109042 - protein, 587 aa, Arabidopsis thaliana; identical to SEQ ID NO: 97803
  peptide (1)..(587): Ceres Seq. ID no. 13576327

SEQ ID NO: 109043 - protein, 586 aa, Arabidopsis thaliana; identical to SEQ ID NO: 97804
  peptide (1)..(586): Ceres Seq. ID no. 13576328

SEQ ID NO: 109044 - DNA, 934 bp, Arabidopsis thaliana; identical to SEQ ID NO: 97805
  misc_feature (1)..(934): Ceres Seq. ID no. 13576339
  misc_feature (1)..(934): Ortholog of  Ceres SEQ ID NO 13638567 as cited in SEQ ID NO 51303
  misc_feature (1)..(934): Ortholog of  Ceres SEQ ID NO 12610031 as cited in SEQ ID NO 55811
  misc_feature (1)..(934): Ortholog of  Ceres SEQ ID NO 12610896 as cited in SEQ ID NO 55861
  misc_feature (1)..(934): Ortholog of  Ceres SEQ ID NO 12619664 as cited in SEQ ID NO 66048
  misc_feature (1)..(934): Ortholog of  Ceres SEQ ID NO 12635952 as cited in SEQ ID NO 0

SEQ ID NO: 109045 - protein, 209 aa, Arabidopsis thaliana; identical to SEQ ID NO: 34803
  peptide (1)..(209): Ceres Seq. ID no. 13576340

SEQ ID NO: 109046 - protein, 111 aa, Arabidopsis thaliana; identical to SEQ ID NO: 34804
  peptide (1)..(111): Ceres Seq. ID no. 13576341

SEQ ID NO: 109047 - DNA, 1074 bp, Arabidopsis thaliana; identical to SEQ ID NO: 97808
  misc_feature (1)..(1074): Ceres Seq. ID no. 13576346
  misc_feature (1)..(1074): Ortholog of  Ceres SEQ ID NO 13597333 as cited in SEQ ID NO 63974
  misc_feature (1)..(1074): Ortholog of  Ceres SEQ ID NO 13599307 as cited in SEQ ID NO 0

SEQ ID NO: 109048 - protein, 279 aa, Arabidopsis thaliana; identical to SEQ ID NO: 26212
  peptide (1)..(279): Ceres Seq. ID no. 13576347

SEQ ID NO: 109049 - protein, 213 aa, Arabidopsis thaliana; identical to SEQ ID NO: 26213
  peptide (1)..(213): Ceres Seq. ID no. 13576348

SEQ ID NO: 109050 - protein, 212 aa, Arabidopsis thaliana; identical to SEQ ID NO: 27066
  peptide (1)..(212): Ceres Seq. ID no. 13576349

SEQ ID NO: 109051 - DNA, 740 bp, Arabidopsis thaliana; identical to SEQ ID NO: 97812
  misc_feature (1)..(740): Ceres Seq. ID no. 13576352
  misc_feature (1)..(740): Ortholog of  Ceres SEQ ID NO 13660334 as cited in SEQ ID NO 67468

SEQ ID NO: 109052 - protein, 129 aa, Arabidopsis thaliana; identical to SEQ ID NO: 23535
  peptide (1)..(129): Ceres Seq. ID no. 13576353

SEQ ID NO: 109053 - protein, 87 aa, Arabidopsis thaliana; identical to SEQ ID NO: 23536
  peptide (1)..(87): Ceres Seq. ID no. 13576354

SEQ ID NO: 109054 - DNA, 1030 bp, Arabidopsis thaliana; identical to SEQ ID NO: 97815
  misc_feature (1)..(1030): Ceres Seq. ID no. 13576355
  misc_feature (1)..(1030): Ortholog of  Ceres SEQ ID NO 12610385 as cited in SEQ ID NO 55938
  misc_feature (1)..(1030): Ortholog of  Ceres SEQ ID NO 13661939 as cited in SEQ ID NO 61170

SEQ ID NO: 109055 - protein, 173 aa, Arabidopsis thaliana; identical to SEQ ID NO: 81692
  peptide (1)..(173): Ceres Seq. ID no. 13576356

SEQ ID NO: 109056 - protein, 143 aa, Arabidopsis thaliana; identical to SEQ ID NO: 81693
  peptide (1)..(143): Ceres Seq. ID no. 13576357

SEQ ID NO: 109057 - protein, 141 aa, Arabidopsis thaliana; identical to SEQ ID NO: 81694
  peptide (1)..(141): Ceres Seq. ID no. 13576358

SEQ ID NO: 109058 - DNA, 1479 bp, Arabidopsis thaliana; identical to SEQ ID NO: 97819
  misc_feature (1)..(1479): Ceres Seq. ID no. 13576359
  misc_feature (1)..(1479): Ortholog of  Ceres SEQ ID NO 14315346 as cited in SEQ ID NO 53970
  misc_feature (1)..(1479): Ortholog of  Ceres SEQ ID NO 13594128 as cited in SEQ ID NO 58608
  misc_feature (1)..(1479): Ortholog of  Ceres SEQ ID NO 14309682 as cited in SEQ ID NO 58908
  misc_feature (1)..(1479): Ortholog of  Ceres SEQ ID NO 15176122 as cited in SEQ ID NO 62462
  misc_feature (1)..(1479): Ortholog of  Ceres SEQ ID NO 12624849 as cited in SEQ ID NO 62773

SEQ ID NO: 109059 - protein, 413 aa, Arabidopsis thaliana; identical to SEQ ID NO: 42167
  peptide (1)..(413): Ceres Seq. ID no. 13576360

SEQ ID NO: 109060 - protein, 389 aa, Arabidopsis thaliana; identical to SEQ ID NO: 24019
  peptide (1)..(389): Ceres Seq. ID no. 13576361

SEQ ID NO: 109061 - protein, 324 aa, Arabidopsis thaliana; identical to SEQ ID NO: 24020
  peptide (1)..(324): Ceres Seq. ID no. 13576362

SEQ ID NO: 109062 - DNA, 1325 bp, Arabidopsis thaliana; identical to SEQ ID NO: 97823
  misc_feature (1)..(1325): Ceres Seq. ID no. 13576363
  misc_feature (1)..(1325): Ortholog of  Ceres SEQ ID NO 13596585 as cited in SEQ ID NO 62424
  misc_feature (1)..(1325): Ortholog of  Ceres SEQ ID NO 15225240 as cited in SEQ ID NO 66495

SEQ ID NO: 109063 - protein, 375 aa, Arabidopsis thaliana; identical to SEQ ID NO: 40103
  peptide (1)..(375): Ceres Seq. ID no. 13576364

SEQ ID NO: 109064 - protein, 290 aa, Arabidopsis thaliana; identical to SEQ ID NO: 40104
  peptide (1)..(290): Ceres Seq. ID no. 13576365

SEQ ID NO: 109065 - protein, 286 aa, Arabidopsis thaliana; identical to SEQ ID NO: 40105
  peptide (1)..(286): Ceres Seq. ID no. 13576366

SEQ ID NO: 109066 - DNA, 1395 bp, Arabidopsis thaliana; identical to SEQ ID NO: 97827
  misc_feature (1)..(1395): Ceres Seq. ID no. 13576371
  misc_feature (1)..(1395): Ortholog of  Ceres SEQ ID NO 13596090 as cited in SEQ ID NO 68377

SEQ ID NO: 109067 - protein, 272 aa, Arabidopsis thaliana; identical to SEQ ID NO: 43120
  peptide (1)..(272): Ceres Seq. ID no. 13576372

SEQ ID NO: 109068 - protein, 188 aa, Arabidopsis thaliana; identical to SEQ ID NO: 43121
  peptide (1)..(188): Ceres Seq. ID no. 13576373

SEQ ID NO: 109069 - protein, 172 aa, Arabidopsis thaliana; identical to SEQ ID NO: 43122
  peptide (1)..(172): Ceres Seq. ID no. 13576374

SEQ ID NO: 109070 - DNA, 1364 bp, Arabidopsis thaliana; identical to SEQ ID NO: 97831
  misc_feature (1)..(1364): Ceres Seq. ID no. 13576379
  misc_feature (1)..(1364): Ortholog of  Ceres SEQ ID NO 13596554 as cited in SEQ ID NO 62818
  misc_feature (1164)..(1164): n is a, c, t, g, unknown, or other
  misc_feature (1191)..(1191): n is a, c, t, g, unknown, or other
  misc_feature (1303)..(1303): n is a, c, t, g, unknown, or other
  misc_feature (1322)..(1322): n is a, c, t, g, unknown, or other

SEQ ID NO: 109071 - protein, 384 aa, Arabidopsis thaliana; identical to SEQ ID NO: 97832
  peptide (1)..(384): Ceres Seq. ID no. 13576380

SEQ ID NO: 109072 - protein, 306 aa, Arabidopsis thaliana; identical to SEQ ID NO: 97833
  peptide (1)..(306): Ceres Seq. ID no. 13576381

SEQ ID NO: 109073 - protein, 278 aa, Arabidopsis thaliana; identical to SEQ ID NO: 97834
  peptide (1)..(278): Ceres Seq. ID no. 13576382

SEQ ID NO: 109074 - DNA, 1366 bp, Arabidopsis thaliana; identical to SEQ ID NO: 97835
  misc_feature (1)..(1366): Ceres Seq. ID no. 13576383
  misc_feature (1)..(1366): Ortholog of  Ceres SEQ ID NO 13662937 as cited in SEQ ID NO 64415
  misc_feature (1)..(1366): Ortholog of  Ceres SEQ ID NO 13595984 as cited in SEQ ID NO 68340
  misc_feature (1)..(1366): Ortholog of  Ceres SEQ ID NO 12635014 as cited in SEQ ID NO 0

SEQ ID NO: 109075 - protein, 412 aa, Arabidopsis thaliana; identical to SEQ ID NO: 97836
  peptide (1)..(412): Ceres Seq. ID no. 13576384

SEQ ID NO: 109076 - protein, 391 aa, Arabidopsis thaliana; identical to SEQ ID NO: 95866
  peptide (1)..(391): Ceres Seq. ID no. 13576385

SEQ ID NO: 109077 - protein, 374 aa, Arabidopsis thaliana; identical to SEQ ID NO: 95867
  peptide (1)..(374): Ceres Seq. ID no. 13576386

SEQ ID NO: 109078 - DNA, 794 bp, Arabidopsis thaliana; identical to SEQ ID NO: 97839
  misc_feature (1)..(794): Ceres Seq. ID no. 13576387
  misc_feature (1)..(794): Ortholog of  Ceres SEQ ID NO 15227036 as cited in SEQ ID NO 61662
  misc_feature (1)..(794): Ortholog of  Ceres SEQ ID NO 12635268 as cited in SEQ ID NO 0

SEQ ID NO: 109079 - protein, 141 aa, Arabidopsis thaliana; identical to SEQ ID NO: 97840
  peptide (1)..(141): Ceres Seq. ID no. 13576388

SEQ ID NO: 109080 - protein, 76 aa, Arabidopsis thaliana; identical to SEQ ID NO: 37578
  peptide (1)..(76): Ceres Seq. ID no. 13576389

SEQ ID NO: 109081 - DNA, 1206 bp, Arabidopsis thaliana; identical to SEQ ID NO: 97842
  misc_feature (1)..(1206): Ceres Seq. ID no. 13576390
  misc_feature (1)..(1206): Ortholog of  Ceres SEQ ID NO 15169545 as cited in SEQ ID NO 67456

SEQ ID NO: 109082 - protein, 277 aa, Arabidopsis thaliana; identical to SEQ ID NO: 21044
  peptide (1)..(277): Ceres Seq. ID no. 13576391

SEQ ID NO: 109083 - protein, 233 aa, Arabidopsis thaliana; identical to SEQ ID NO: 21045
  peptide (1)..(233): Ceres Seq. ID no. 13576392

SEQ ID NO: 109084 - DNA, 1394 bp, Arabidopsis thaliana; identical to SEQ ID NO: 97845
  misc_feature (1)..(1394): Ceres Seq. ID no. 13576393
  misc_feature (1)..(1394): Ortholog of  Ceres SEQ ID NO 14307526 as cited in SEQ ID NO 58875

SEQ ID NO: 109085 - protein, 325 aa, Arabidopsis thaliana; identical to SEQ ID NO: 36222
  peptide (1)..(325): Ceres Seq. ID no. 13576394

SEQ ID NO: 109086 - protein, 323 aa, Arabidopsis thaliana; identical to SEQ ID NO: 36223
  peptide (1)..(323): Ceres Seq. ID no. 13576395

SEQ ID NO: 109087 - protein, 274 aa, Arabidopsis thaliana; identical to SEQ ID NO: 36224
  peptide (1)..(274): Ceres Seq. ID no. 13576396

SEQ ID NO: 109088 - DNA, 906 bp, Arabidopsis thaliana; identical to SEQ ID NO: 97849
  misc_feature (1)..(906): Ceres Seq. ID no. 13576397
  misc_feature (1)..(906): Ortholog of  Ceres SEQ ID NO 13595433 as cited in SEQ ID NO 56659

SEQ ID NO: 109089 - protein, 163 aa, Arabidopsis thaliana; identical to SEQ ID NO: 20801
  peptide (1)..(163): Ceres Seq. ID no. 13576398

SEQ ID NO: 109090 - protein, 161 aa, Arabidopsis thaliana; identical to SEQ ID NO: 20802
  peptide (1)..(161): Ceres Seq. ID no. 13576399

SEQ ID NO: 109091 - protein, 85 aa, Arabidopsis thaliana; identical to SEQ ID NO: 20803
  peptide (1)..(85): Ceres Seq. ID no. 13576400

SEQ ID NO: 109092 - DNA, 957 bp, Arabidopsis thaliana; identical to SEQ ID NO: 97853
  misc_feature (1)..(957): Ceres Seq. ID no. 13576401
  misc_feature (1)..(957): Ortholog of  Ceres SEQ ID NO 13583408 as cited in SEQ ID NO 62616
  misc_feature (1)..(957): Ortholog of  Ceres SEQ ID NO 15179752 as cited in SEQ ID NO 63074

SEQ ID NO: 109093 - protein, 267 aa, Arabidopsis thaliana; identical to SEQ ID NO: 97854
  peptide (1)..(267): Ceres Seq. ID no. 13576402

SEQ ID NO: 109094 - protein, 242 aa, Arabidopsis thaliana; identical to SEQ ID NO: 23649
  peptide (1)..(242): Ceres Seq. ID no. 13576403

SEQ ID NO: 109095 - DNA, 1524 bp, Arabidopsis thaliana; identical to SEQ ID NO: 97856
  misc_feature (1)..(1524): Ceres Seq. ID no. 13576404
  misc_feature (1)..(1524): Ortholog of  Ceres SEQ ID NO 13655988 as cited in SEQ ID NO 65557

SEQ ID NO: 109096 - protein, 398 aa, Arabidopsis thaliana; identical to SEQ ID NO: 43642
  peptide (1)..(398): Ceres Seq. ID no. 13576405

SEQ ID NO: 109097 - protein, 344 aa, Arabidopsis thaliana; identical to SEQ ID NO: 43643
  peptide (1)..(344): Ceres Seq. ID no. 13576406

SEQ ID NO: 109098 - protein, 330 aa, Arabidopsis thaliana; identical to SEQ ID NO: 43644
  peptide (1)..(330): Ceres Seq. ID no. 13576407

SEQ ID NO: 109099 - DNA, 1626 bp, Arabidopsis thaliana; identical to SEQ ID NO: 97860
  misc_feature (1)..(1626): Ceres Seq. ID no. 13576408
  misc_feature (1)..(1626): Ortholog of  Ceres SEQ ID NO 13597865 as cited in SEQ ID NO 64954

SEQ ID NO: 109100 - protein, 397 aa, Arabidopsis thaliana; identical to SEQ ID NO: 87445
  peptide (1)..(397): Ceres Seq. ID no. 13576409

SEQ ID NO: 109101 - protein, 389 aa, Arabidopsis thaliana; identical to SEQ ID NO: 87446
  peptide (1)..(389): Ceres Seq. ID no. 13576410

SEQ ID NO: 109102 - protein, 382 aa, Arabidopsis thaliana; identical to SEQ ID NO: 87447
  peptide (1)..(382): Ceres Seq. ID no. 13576411

SEQ ID NO: 109103 - DNA, 759 bp, Arabidopsis thaliana; identical to SEQ ID NO: 97864
  misc_feature (1)..(759): Ceres Seq. ID no. 13576419
  misc_feature (1)..(759): Ortholog of  Ceres SEQ ID NO 15173608 as cited in SEQ ID NO 57605

SEQ ID NO: 109104 - protein, 198 aa, Arabidopsis thaliana; identical to SEQ ID NO: 97865
  peptide (1)..(198): Ceres Seq. ID no. 13576420

SEQ ID NO: 109105 - protein, 166 aa, Arabidopsis thaliana; identical to SEQ ID NO: 30604
  peptide (1)..(166): Ceres Seq. ID no. 13576421

SEQ ID NO: 109106 - DNA, 937 bp, Arabidopsis thaliana; identical to SEQ ID NO: 97867
  misc_feature (1)..(937): Ceres Seq. ID no. 13576426
  misc_feature (1)..(937): Ortholog of  Ceres SEQ ID NO 14302000 as cited in SEQ ID NO 52175
  misc_feature (1)..(937): Ortholog of  Ceres SEQ ID NO 14316371 as cited in SEQ ID NO 60113

SEQ ID NO: 109107 - protein, 245 aa, Arabidopsis thaliana; identical to SEQ ID NO: 97868
  peptide (1)..(245): Ceres Seq. ID no. 13576427

SEQ ID NO: 109108 - protein, 217 aa, Arabidopsis thaliana; identical to SEQ ID NO: 97869
  peptide (1)..(217): Ceres Seq. ID no. 13576428

SEQ ID NO: 109109 - protein, 138 aa, Arabidopsis thaliana; identical to SEQ ID NO: 97870
  peptide (1)..(138): Ceres Seq. ID no. 13576429

SEQ ID NO: 109110 - DNA, 1222 bp, Arabidopsis thaliana; identical to SEQ ID NO: 97871
  misc_feature (1)..(1222): Ceres Seq. ID no. 13576448
  misc_feature (1)..(1222): Ortholog of  Ceres SEQ ID NO 13637842 as cited in SEQ ID NO 54650
  misc_feature (1)..(1222): Ortholog of  Ceres SEQ ID NO 12608127 as cited in SEQ ID NO 57579
  misc_feature (1)..(1222): Ortholog of  Ceres SEQ ID NO 12634558 as cited in SEQ ID NO 0
  misc_feature (1)..(1222): Ortholog of  Ceres SEQ ID NO 15180294 as cited in SEQ ID NO 0

SEQ ID NO: 109111 - protein, 260 aa, Arabidopsis thaliana; identical to SEQ ID NO: 21236
  peptide (1)..(260): Ceres Seq. ID no. 13576449

SEQ ID NO: 109112 - protein, 182 aa, Arabidopsis thaliana; identical to SEQ ID NO: 21237
  peptide (1)..(182): Ceres Seq. ID no. 13576450

SEQ ID NO: 109113 - protein, 134 aa, Arabidopsis thaliana; identical to SEQ ID NO: 21238
  peptide (1)..(134): Ceres Seq. ID no. 13576451

SEQ ID NO: 109114 - DNA, 1125 bp, Arabidopsis thaliana; identical to SEQ ID NO: 97875
  misc_feature (1)..(1125): Ceres Seq. ID no. 13576452
  misc_feature (1)..(1125): Ortholog of  Ceres SEQ ID NO 15169972 as cited in SEQ ID NO 51692

SEQ ID NO: 109115 - protein, 291 aa, Arabidopsis thaliana; identical to SEQ ID NO: 97876
  peptide (1)..(291): Ceres Seq. ID no. 13576453

SEQ ID NO: 109116 - protein, 232 aa, Arabidopsis thaliana; identical to SEQ ID NO: 97877
  peptide (1)..(232): Ceres Seq. ID no. 13576454

SEQ ID NO: 109117 - DNA, 880 bp, Arabidopsis thaliana; identical to SEQ ID NO: 97878
  misc_feature (1)..(880): Ceres Seq. ID no. 13576459
  misc_feature (1)..(880): Ortholog of  Ceres SEQ ID NO 15172968 as cited in SEQ ID NO 51755
  misc_feature (1)..(880): Ortholog of  Ceres SEQ ID NO 12610046 as cited in SEQ ID NO 55841
  misc_feature (1)..(880): Ortholog of  Ceres SEQ ID NO 13663630 as cited in SEQ ID NO 67065

SEQ ID NO: 109118 - protein, 140 aa, Arabidopsis thaliana; identical to SEQ ID NO: 25588
  peptide (1)..(140): Ceres Seq. ID no. 13576460

SEQ ID NO: 109119 - protein, 139 aa, Arabidopsis thaliana; identical to SEQ ID NO: 25589
  peptide (1)..(139): Ceres Seq. ID no. 13576461

SEQ ID NO: 109120 - protein, 135 aa, Arabidopsis thaliana; identical to SEQ ID NO: 25590
  peptide (1)..(135): Ceres Seq. ID no. 13576462

SEQ ID NO: 109121 - DNA, 895 bp, Arabidopsis thaliana; identical to SEQ ID NO: 97882
  misc_feature (1)..(895): Ceres Seq. ID no. 13576469
  misc_feature (1)..(895): Ortholog of  Ceres SEQ ID NO 13638595 as cited in SEQ ID NO 52050
  misc_feature (1)..(895): Ortholog of  Ceres SEQ ID NO 12623490 as cited in SEQ ID NO 61136
  misc_feature (1)..(895): Ortholog of  Ceres SEQ ID NO 14301870 as cited in SEQ ID NO 61501
  misc_feature (1)..(895): Ortholog of  Ceres SEQ ID NO 12583993 as cited in SEQ ID NO 68098

SEQ ID NO: 109122 - protein, 211 aa, Arabidopsis thaliana; identical to SEQ ID NO: 97883
  peptide (1)..(211): Ceres Seq. ID no. 13576470

SEQ ID NO: 109123 - protein, 209 aa, Arabidopsis thaliana; identical to SEQ ID NO: 97884
  peptide (1)..(209): Ceres Seq. ID no. 13576471

SEQ ID NO: 109124 - DNA, 1150 bp, Arabidopsis thaliana; identical to SEQ ID NO: 97885
  misc_feature (1)..(1150): Ceres Seq. ID no. 13576472
  misc_feature (1)..(1150): Ortholog of  Ceres SEQ ID NO 15178931 as cited in SEQ ID NO 1125
  misc_feature (1)..(1150): Ortholog of  Ceres SEQ ID NO 13596648 as cited in SEQ ID NO 63080

SEQ ID NO: 109125 - protein, 269 aa, Arabidopsis thaliana; identical to SEQ ID NO: 97886
  peptide (1)..(269): Ceres Seq. ID no. 13576473

SEQ ID NO: 109126 - protein, 218 aa, Arabidopsis thaliana; identical to SEQ ID NO: 21774
  peptide (1)..(218): Ceres Seq. ID no. 13576474

SEQ ID NO: 109127 - DNA, 668 bp, Arabidopsis thaliana; identical to SEQ ID NO: 97888
  misc_feature (1)..(668): Ceres Seq. ID no. 13576475
  misc_feature (1)..(668): Ortholog of  Ceres SEQ ID NO 12783998 as cited in SEQ ID NO 61535
  misc_feature (1)..(668): Ortholog of  Ceres SEQ ID NO 15174264 as cited in SEQ ID NO 61877

SEQ ID NO: 109128 - protein, 145 aa, Arabidopsis thaliana; identical to SEQ ID NO: 97889
  peptide (1)..(145): Ceres Seq. ID no. 13576476

SEQ ID NO: 109129 - DNA, 1470 bp, Arabidopsis thaliana; identical to SEQ ID NO: 97890
  misc_feature (1)..(1470): Ceres Seq. ID no. 13576477
  misc_feature (1)..(1470): Ortholog of  Ceres SEQ ID NO 15172426 as cited in SEQ ID NO 59156

SEQ ID NO: 109130 - protein, 414 aa, Arabidopsis thaliana; identical to SEQ ID NO: 97891
  peptide (1)..(414): Ceres Seq. ID no. 13576478

SEQ ID NO: 109131 - protein, 366 aa, Arabidopsis thaliana; identical to SEQ ID NO: 97892
  peptide (1)..(366): Ceres Seq. ID no. 13576479

SEQ ID NO: 109132 - protein, 278 aa, Arabidopsis thaliana; identical to SEQ ID NO: 24715
  peptide (1)..(278): Ceres Seq. ID no. 13576480

SEQ ID NO: 109133 - DNA, 789 bp, Arabidopsis thaliana; identical to SEQ ID NO: 97894
  misc_feature (1)..(789): Ceres Seq. ID no. 13576485
  misc_feature (1)..(789): Ortholog of  Ceres SEQ ID NO 12609890 as cited in SEQ ID NO 51792
  misc_feature (1)..(789): Ortholog of  Ceres SEQ ID NO 12597253 as cited in SEQ ID NO 62959
  misc_feature (1)..(789): Ortholog of  Ceres SEQ ID NO 15173341 as cited in SEQ ID NO 63800
  misc_feature (1)..(789): Ortholog of  Ceres SEQ ID NO 12635416 as cited in SEQ ID NO 0
  misc_feature (1)..(789): Ortholog of  Ceres SEQ ID NO 12635564 as cited in SEQ ID NO 0
  misc_feature (1)..(789): Ortholog of  Ceres SEQ ID NO 12636917 as cited in SEQ ID NO 0
  misc_feature (1)..(789): Ortholog of  Ceres SEQ ID NO 14309430 as cited in SEQ ID NO 0

SEQ ID NO: 109134 - protein, 150 aa, Arabidopsis thaliana; identical to SEQ ID NO: 27208
  peptide (1)..(150): Ceres Seq. ID no. 13576486

SEQ ID NO: 109135 - DNA, 1066 bp, Arabidopsis thaliana; identical to SEQ ID NO: 97896
  misc_feature (1)..(1066): Ceres Seq. ID no. 13576487
  misc_feature (1)..(1066): Ortholog of  Ceres SEQ ID NO 13594416 as cited in SEQ ID NO 51058
  misc_feature (1)..(1066): Ortholog of  Ceres SEQ ID NO 13596609 as cited in SEQ ID NO 63070
  misc_feature (1)..(1066): Ortholog of  Ceres SEQ ID NO 12616895 as cited in SEQ ID NO 63909
  misc_feature (1)..(1066): Ortholog of  Ceres SEQ ID NO 14302096 as cited in SEQ ID NO 68356
  misc_feature (1)..(1066): Ortholog of  Ceres SEQ ID NO 13598574 as cited in SEQ ID NO 69083

SEQ ID NO: 109136 - protein, 291 aa, Arabidopsis thaliana; identical to SEQ ID NO: 97897
  peptide (1)..(291): Ceres Seq. ID no. 13576488

SEQ ID NO: 109137 - protein, 269 aa, Arabidopsis thaliana; identical to SEQ ID NO: 79186
  peptide (1)..(269): Ceres Seq. ID no. 13576489

SEQ ID NO: 109138 - protein, 192 aa, Arabidopsis thaliana; identical to SEQ ID NO: 79187
  peptide (1)..(192): Ceres Seq. ID no. 13576490

SEQ ID NO: 109139 - DNA, 942 bp, Arabidopsis thaliana; identical to SEQ ID NO: 97900
  misc_feature (1)..(942): Ceres Seq. ID no. 13576491
  misc_feature (1)..(942): Ortholog of  Ceres SEQ ID NO 13594828 as cited in SEQ ID NO 56431
  misc_feature (1)..(942): Ortholog of  Ceres SEQ ID NO 14316363 as cited in SEQ ID NO 57222
  misc_feature (1)..(942): Ortholog of  Ceres SEQ ID NO 15177754 as cited in SEQ ID NO 57945
  misc_feature (1)..(942): Ortholog of  Ceres SEQ ID NO 13594354 as cited in SEQ ID NO 58082
  misc_feature (1)..(942): Ortholog of  Ceres SEQ ID NO 14316408 as cited in SEQ ID NO 58228
  misc_feature (1)..(942): Ortholog of  Ceres SEQ ID NO 13528075 as cited in SEQ ID NO 60188
  misc_feature (1)..(942): Ortholog of  Ceres SEQ ID NO 13600483 as cited in SEQ ID NO 0

SEQ ID NO: 109140 - protein, 204 aa, Arabidopsis thaliana [sequence omitted]

SEQ ID NO: 109141 - protein, 193 aa, Arabidopsis thaliana; identical to SEQ ID NO: 39070
  peptide (1)..(193): Ceres Seq. ID no. 13576493

SEQ ID NO: 109142 - protein, 153 aa, Arabidopsis thaliana; identical to SEQ ID NO: 39071
  peptide (1)..(153): Ceres Seq. ID no. 13576494

SEQ ID NO: 109143 - DNA, 1454 bp, Arabidopsis thaliana; identical to SEQ ID NO: 97904
  misc_feature (1)..(1454): Ceres Seq. ID no. 13576499
  misc_feature (1)..(1454): Ortholog of  Ceres SEQ ID NO 15177012 as cited in SEQ ID NO 56256
  misc_feature (1)..(1454): Ortholog of  Ceres SEQ ID NO 14311993 as cited in SEQ ID NO 60371
  misc_feature (1)..(1454): Ortholog of  Ceres SEQ ID NO 13596509 as cited in SEQ ID NO 62004
  misc_feature (1)..(1454): Ortholog of  Ceres SEQ ID NO 13500385 as cited in SEQ ID NO 67583

SEQ ID NO: 109144 - protein, 361 aa, Arabidopsis thaliana; identical to SEQ ID NO: 97905
  peptide (1)..(361): Ceres Seq. ID no. 13576500

SEQ ID NO: 109145 - protein, 349 aa, Arabidopsis thaliana; identical to SEQ ID NO: 97906
  peptide (1)..(349): Ceres Seq. ID no. 13576501

SEQ ID NO: 109146 - protein, 346 aa, Arabidopsis thaliana; identical to SEQ ID NO: 97907
  peptide (1)..(346): Ceres Seq. ID no. 13576502

SEQ ID NO: 109147 - DNA, 746 bp, Arabidopsis thaliana; identical to SEQ ID NO: 97908
  misc_feature (1)..(746): Ceres Seq. ID no. 13576511
  misc_feature (1)..(746): Ortholog of  Ceres SEQ ID NO 15179445 as cited in SEQ ID NO 0

SEQ ID NO: 109148 - protein, 159 aa, Arabidopsis thaliana; identical to SEQ ID NO: 21816
  peptide (1)..(159): Ceres Seq. ID no. 13576512

SEQ ID NO: 109149 - DNA, 2050 bp, Arabidopsis thaliana; identical to SEQ ID NO: 97910
  misc_feature (1)..(2050): Ceres Seq. ID no. 13578471
  misc_feature (1)..(2050): Ortholog of  Ceres SEQ ID NO 13654989 as cited in SEQ ID NO 63117
  misc_feature (1)..(2050): Ortholog of  Ceres SEQ ID NO 15169474 as cited in SEQ ID NO 66139
  misc_feature (1)..(2050): Ortholog of  Ceres SEQ ID NO 13584744 as cited in SEQ ID NO 69137

SEQ ID NO: 109150 - protein, 664 aa, Arabidopsis thaliana; identical to SEQ ID NO: 46281
  peptide (1)..(664): Ceres Seq. ID no. 13578472

SEQ ID NO: 109151 - protein, 509 aa, Arabidopsis thaliana; identical to SEQ ID NO: 46282
  peptide (1)..(509): Ceres Seq. ID no. 13578473

SEQ ID NO: 109152 - protein, 508 aa, Arabidopsis thaliana; identical to SEQ ID NO: 46283
  peptide (1)..(508): Ceres Seq. ID no. 13578474

SEQ ID NO: 109153 - DNA, 1953 bp, Arabidopsis thaliana; identical to SEQ ID NO: 97914
  misc_feature (1)..(1953): Ceres Seq. ID no. 13578491
  misc_feature (1)..(1953): Ortholog of  Ceres SEQ ID NO 14316344 as cited in SEQ ID NO 60120

SEQ ID NO: 109154 - protein, 650 aa, Arabidopsis thaliana; identical to SEQ ID NO: 97915
  peptide (1)..(650): Ceres Seq. ID no. 13578492

SEQ ID NO: 109155 - protein, 634 aa, Arabidopsis thaliana; identical to SEQ ID NO: 97916
  peptide (1)..(634): Ceres Seq. ID no. 13578493

SEQ ID NO: 109156 - protein, 612 aa, Arabidopsis thaliana; identical to SEQ ID NO: 97917
  peptide (1)..(612): Ceres Seq. ID no. 13578494

SEQ ID NO: 109157 - DNA, 680 bp, Arabidopsis thaliana; identical to SEQ ID NO: 97918
  misc_feature (1)..(680): Ceres Seq. ID no. 13578553
  misc_feature (1)..(680): Ortholog of  Ceres SEQ ID NO 14310243 as cited in SEQ ID NO 20666

SEQ ID NO: 109158 - protein, 200 aa, Arabidopsis thaliana; identical to SEQ ID NO: 97919
  peptide (1)..(200): Ceres Seq. ID no. 13578554

SEQ ID NO: 109159 - protein, 184 aa, Arabidopsis thaliana; identical to SEQ ID NO: 97920
  peptide (1)..(184): Ceres Seq. ID no. 13578555

SEQ ID NO: 109160 - protein, 142 aa, Arabidopsis thaliana; identical to SEQ ID NO: 82509
  peptide (1)..(142): Ceres Seq. ID no. 13578556

SEQ ID NO: 109161 - DNA, 1262 bp, Arabidopsis thaliana; identical to SEQ ID NO: 97922
  misc_feature (1)..(1262): Ceres Seq. ID no. 13578561
  misc_feature (1)..(1262): Ortholog of  Ceres SEQ ID NO 13596034 as cited in SEQ ID NO 62066

SEQ ID NO: 109162 - protein, 419 aa, Arabidopsis thaliana; identical to SEQ ID NO: 97923
  peptide (1)..(419): Ceres Seq. ID no. 13578562

SEQ ID NO: 109163 - protein, 405 aa, Arabidopsis thaliana; identical to SEQ ID NO: 97924
  peptide (1)..(405): Ceres Seq. ID no. 13578563

SEQ ID NO: 109164 - protein, 392 aa, Arabidopsis thaliana; identical to SEQ ID NO: 97925
  peptide (1)..(392): Ceres Seq. ID no. 13578564

SEQ ID NO: 109165 - DNA, 855 bp, Arabidopsis thaliana; identical to SEQ ID NO: 97926
  misc_feature (1)..(855): Ceres Seq. ID no. 13578580
  misc_feature (1)..(855): Ortholog of  Ceres SEQ ID NO 12616895 as cited in SEQ ID NO 63909
  misc_feature (1)..(855): Ortholog of  Ceres SEQ ID NO 13598574 as cited in SEQ ID NO 69083

SEQ ID NO: 109166 - protein, 264 aa, Arabidopsis thaliana; identical to SEQ ID NO: 97927
  peptide (1)..(264): Ceres Seq. ID no. 13578581

SEQ ID NO: 109167 - DNA, 1467 bp, Arabidopsis thaliana; identical to SEQ ID NO: 97928
  misc_feature (1)..(1467): Ceres Seq. ID no. 13578641
  misc_feature (1)..(1467): Ortholog of  Ceres SEQ ID NO 14315063 as cited in SEQ ID NO 52256
  misc_feature (1)..(1467): Ortholog of  Ceres SEQ ID NO 13597574 as cited in SEQ ID NO 64677
  misc_feature (1)..(1467): Ortholog of  Ceres SEQ ID NO 13662880 as cited in SEQ ID NO 65422
  misc_feature (1)..(1467): Ortholog of  Ceres SEQ ID NO 14302071 as cited in SEQ ID NO 66585
  misc_feature (1)..(1467): Ortholog of  Ceres SEQ ID NO 14316013 as cited in SEQ ID NO 67181
  misc_feature (1)..(1467): Ortholog of  Ceres SEQ ID NO 12779098 as cited in SEQ ID NO 67698
  misc_feature (1)..(1467): Ortholog of  Ceres SEQ ID NO 13596180 as cited in SEQ ID NO 67941
  misc_feature (1)..(1467): Ortholog of  Ceres SEQ ID NO 13591190 as cited in SEQ ID NO 68044
  misc_feature (1)..(1467): Ortholog of  Ceres SEQ ID NO 13596089 as cited in SEQ ID NO 68373

SEQ ID NO: 109168 - protein, 454 aa, Arabidopsis thaliana; identical to SEQ ID NO: 97929
  peptide (1)..(454): Ceres Seq. ID no. 13578642

SEQ ID NO: 109169 - protein, 447 aa, Arabidopsis thaliana; identical to SEQ ID NO: 97930
  peptide (1)..(447): Ceres Seq. ID no. 13578643

SEQ ID NO: 109170 - protein, 424 aa, Arabidopsis thaliana; identical to SEQ ID NO: 97931
  peptide (1)..(424): Ceres Seq. ID no. 13578644

SEQ ID NO: 109171 - DNA, 1161 bp, Arabidopsis thaliana; identical to SEQ ID NO: 97932
  misc_feature (1)..(1161): Ceres Seq. ID no. 13578720
  misc_feature (1)..(1161): Ortholog of  Ceres SEQ ID NO 13596581 as cited in SEQ ID NO 62420
  misc_feature (1)..(1161): Ortholog of  Ceres SEQ ID NO 13591273 as cited in SEQ ID NO 65904
  misc_feature (1)..(1161): Ortholog of  Ceres SEQ ID NO 13623086 as cited in SEQ ID NO 0

SEQ ID NO: 109172 - protein, 386 aa, Arabidopsis thaliana; identical to SEQ ID NO: 97933
  peptide (1)..(386): Ceres Seq. ID no. 13578721

SEQ ID NO: 109173 - protein, 253 aa, Arabidopsis thaliana; identical to SEQ ID NO: 97934
  peptide (1)..(253): Ceres Seq. ID no. 13578722

SEQ ID NO: 109174 - DNA, 1100 bp, Arabidopsis thaliana; identical to SEQ ID NO: 97935
  misc_feature (1)..(1100): Ceres Seq. ID no. 13578723
  misc_feature (1)..(1100): Ortholog of  Ceres SEQ ID NO 12626061 as cited in SEQ ID NO 64594
  misc_feature (1)..(1100): Ortholog of  Ceres SEQ ID NO 15174020 as cited in SEQ ID NO 0
  misc_feature (1)..(1100): Ortholog of  Ceres SEQ ID NO 15179151 as cited in SEQ ID NO 0

SEQ ID NO: 109175 - protein, 237 aa, Arabidopsis thaliana; identical to SEQ ID NO: 46634
  peptide (1)..(237): Ceres Seq. ID no. 13578724

SEQ ID NO: 109176 - DNA, 1220 bp, Arabidopsis thaliana; identical to SEQ ID NO: 97937
  misc_feature (1)..(1220): Ceres Seq. ID no. 13578733
  misc_feature (1)..(1220): Ortholog of  Ceres SEQ ID NO 14301822 as cited in SEQ ID NO 66211

SEQ ID NO: 109177 - protein, 339 aa, Arabidopsis thaliana; identical to SEQ ID NO: 97938
  peptide (1)..(339): Ceres Seq. ID no. 13578734

SEQ ID NO: 109178 - protein, 305 aa, Arabidopsis thaliana; identical to SEQ ID NO: 97939
  peptide (1)..(305): Ceres Seq. ID no. 13578735

SEQ ID NO: 109179 - protein, 298 aa, Arabidopsis thaliana; identical to SEQ ID NO: 97940
  peptide (1)..(298): Ceres Seq. ID no. 13578736

SEQ ID NO: 109180 - DNA, 2414 bp, Arabidopsis thaliana; identical to SEQ ID NO: 97941
  misc_feature (1)..(2414): Ceres Seq. ID no. 13578752
  misc_feature (1)..(2414): Ortholog of  Ceres SEQ ID NO 13654290 as cited in SEQ ID NO 62197
  misc_feature (1)..(2414): Ortholog of  Ceres SEQ ID NO 14301924 as cited in SEQ ID NO 67731

SEQ ID NO: 109181 - protein, 735 aa, Arabidopsis thaliana; identical to SEQ ID NO: 97942
  peptide (1)..(735): Ceres Seq. ID no. 13578753

SEQ ID NO: 109182 - protein, 646 aa, Arabidopsis thaliana; identical to SEQ ID NO: 45959
  peptide (1)..(646): Ceres Seq. ID no. 13578754

SEQ ID NO: 109183 - protein, 552 aa, Arabidopsis thaliana; identical to SEQ ID NO: 45960
  peptide (1)..(552): Ceres Seq. ID no. 13578755

SEQ ID NO: 109184 - DNA, 1171 bp, Arabidopsis thaliana; identical to SEQ ID NO: 97945
  misc_feature (1)..(1171): Ceres Seq. ID no. 13578787
  misc_feature (1)..(1171): Ortholog of  Ceres SEQ ID NO 12364737 as cited in SEQ ID NO 51089
  misc_feature (1)..(1171): Ortholog of  Ceres SEQ ID NO 14311515 as cited in SEQ ID NO 51680
  misc_feature (1)..(1171): Ortholog of  Ceres SEQ ID NO 13582301 as cited in SEQ ID NO 56509
  misc_feature (1)..(1171): Ortholog of  Ceres SEQ ID NO 13595567 as cited in SEQ ID NO 56760
  misc_feature (1)..(1171): Ortholog of  Ceres SEQ ID NO 13655302 as cited in SEQ ID NO 63307
  misc_feature (1)..(1171): Ortholog of  Ceres SEQ ID NO 13597380 as cited in SEQ ID NO 64054
  misc_feature (1)..(1171): Ortholog of  Ceres SEQ ID NO 12625474 as cited in SEQ ID NO 64169
  misc_feature (1)..(1171): Ortholog of  Ceres SEQ ID NO 13597502 as cited in SEQ ID NO 64681
  misc_feature (1)..(1171): Ortholog of  Ceres SEQ ID NO 15180805 as cited in SEQ ID NO 0

SEQ ID NO: 109185 - protein, 389 aa, Arabidopsis thaliana; identical to SEQ ID NO: 48855
  peptide (1)..(389): Ceres Seq. ID no. 13578788

SEQ ID NO: 109186 - protein, 384 aa, Arabidopsis thaliana; identical to SEQ ID NO: 48856
  peptide (1)..(384): Ceres Seq. ID no. 13578789

SEQ ID NO: 109187 - protein, 284 aa, Arabidopsis thaliana; identical to SEQ ID NO: 48857
  peptide (1)..(284): Ceres Seq. ID no. 13578790

SEQ ID NO: 109188 - DNA, 1674 bp, Arabidopsis thaliana; identical to SEQ ID NO: 97949
  misc_feature (1)..(1674): Ceres Seq. ID no. 13578791
  misc_feature (1)..(1674): Ortholog of  Ceres SEQ ID NO 13654166 as cited in SEQ ID NO 68381
  misc_feature (1)..(1674): Ortholog of  Ceres SEQ ID NO 13599720 as cited in SEQ ID NO 0

SEQ ID NO: 109189 - protein, 486 aa, Arabidopsis thaliana; identical to SEQ ID NO: 97950
  peptide (1)..(486): Ceres Seq. ID no. 13578792

SEQ ID NO: 109190 - protein, 460 aa, Arabidopsis thaliana; identical to SEQ ID NO: 97951
  peptide (1)..(460): Ceres Seq. ID no. 13578793

SEQ ID NO: 109191 - protein, 424 aa, Arabidopsis thaliana; identical to SEQ ID NO: 97952
  peptide (1)..(424): Ceres Seq. ID no. 13578794

SEQ ID NO: 109192 - DNA, 981 bp, Arabidopsis thaliana; identical to SEQ ID NO: 97953
  misc_feature (1)..(981): Ceres Seq. ID no. 13578803
  misc_feature (1)..(981): Ortholog of  Ceres SEQ ID NO 12562983 as cited in SEQ ID NO 53309
  misc_feature (1)..(981): Ortholog of  Ceres SEQ ID NO 14309224 as cited in SEQ ID NO 0

SEQ ID NO: 109193 - protein, 300 aa, Arabidopsis thaliana; identical to SEQ ID NO: 97954
  peptide (1)..(300): Ceres Seq. ID no. 13578804

SEQ ID NO: 109194 - protein, 196 aa, Arabidopsis thaliana; identical to SEQ ID NO: 97955
  peptide (1)..(196): Ceres Seq. ID no. 13578805

SEQ ID NO: 109195 - protein, 190 aa, Arabidopsis thaliana; identical to SEQ ID NO: 97956
  peptide (1)..(190): Ceres Seq. ID no. 13578806

SEQ ID NO: 109196 - DNA, 1751 bp, Arabidopsis thaliana; identical to SEQ ID NO: 97957
  misc_feature (1)..(1751): Ceres Seq. ID no. 13578815
  misc_feature (1)..(1751): Ortholog of  Ceres SEQ ID NO 15174947 as cited in SEQ ID NO 236

SEQ ID NO: 109197 - protein, 550 aa, Arabidopsis thaliana; identical to SEQ ID NO: 97958
  peptide (1)..(550): Ceres Seq. ID no. 13578816

SEQ ID NO: 109198 - protein, 545 aa, Arabidopsis thaliana; identical to SEQ ID NO: 97959
  peptide (1)..(545): Ceres Seq. ID no. 13578817

SEQ ID NO: 109199 - protein, 498 aa, Arabidopsis thaliana; identical to SEQ ID NO: 97960
  peptide (1)..(498): Ceres Seq. ID no. 13578818

SEQ ID NO: 109200 - DNA, 4270 bp, Arabidopsis thaliana; identical to SEQ ID NO: 97961
  misc_feature (1)..(4270): Ceres Seq. ID no. 13578874
  misc_feature (1)..(4270): Ortholog of  Ceres SEQ ID NO 13666169 as cited in SEQ ID NO 0

SEQ ID NO: 109201 - protein, 1309 aa, Arabidopsis thaliana; identical to SEQ ID NO: 97962
  peptide (1)..(1309): Ceres Seq. ID no. 13578875

SEQ ID NO: 109202 - protein, 1291 aa, Arabidopsis thaliana; identical to SEQ ID NO: 97963
  peptide (1)..(1291): Ceres Seq. ID no. 13578876

SEQ ID NO: 109203 - protein, 1235 aa, Arabidopsis thaliana; identical to SEQ ID NO: 97964
  peptide (1)..(1235): Ceres Seq. ID no. 13578877

SEQ ID NO: 109204 - DNA, 2839 bp, Arabidopsis thaliana; identical to SEQ ID NO: 97965
  misc_feature (1)..(2839): Ceres Seq. ID no. 13578909
  misc_feature (1)..(2839): Ortholog of  Ceres SEQ ID NO 15174477 as cited in SEQ ID NO 20777

SEQ ID NO: 109205 - protein, 487 aa, Arabidopsis thaliana; identical to SEQ ID NO: 97966
  peptide (1)..(487): Ceres Seq. ID no. 13578910

SEQ ID NO: 109206 - protein, 334 aa, Arabidopsis thaliana; identical to SEQ ID NO: 97967
  peptide (1)..(334): Ceres Seq. ID no. 13578911

SEQ ID NO: 109207 - protein, 311 aa, Arabidopsis thaliana; identical to SEQ ID NO: 97968
  peptide (1)..(311): Ceres Seq. ID no. 13578912

SEQ ID NO: 109208 - DNA, 1070 bp, Arabidopsis thaliana; identical to SEQ ID NO: 97969
  misc_feature (1)..(1070): Ceres Seq. ID no. 13578948
  misc_feature (1)..(1070): Ortholog of  Ceres SEQ ID NO 13595861 as cited in SEQ ID NO 58153
  misc_feature (1)..(1070): Ortholog of  Ceres SEQ ID NO 13584292 as cited in SEQ ID NO 63687

SEQ ID NO: 109209 - protein, 265 aa, Arabidopsis thaliana; identical to SEQ ID NO: 97970
  peptide (1)..(265): Ceres Seq. ID no. 13578949

SEQ ID NO: 109210 - protein, 209 aa, Arabidopsis thaliana; identical to SEQ ID NO: 97971
  peptide (1)..(209): Ceres Seq. ID no. 13578950

SEQ ID NO: 109211 - protein, 161 aa, Arabidopsis thaliana; identical to SEQ ID NO: 48641
  peptide (1)..(161): Ceres Seq. ID no. 13578951

SEQ ID NO: 109212 - DNA, 1392 bp, Arabidopsis thaliana; identical to SEQ ID NO: 97973
  misc_feature (1)..(1392): Ceres Seq. ID no. 13578952
  misc_feature (1)..(1392): Ortholog of  Ceres SEQ ID NO 14314312 as cited in SEQ ID NO 57283

SEQ ID NO: 109213 - protein, 321 aa, Arabidopsis thaliana; identical to SEQ ID NO: 97974
  peptide (1)..(321): Ceres Seq. ID no. 13578953

SEQ ID NO: 109214 - protein, 170 aa, Arabidopsis thaliana; identical to SEQ ID NO: 97975
  peptide (1)..(170): Ceres Seq. ID no. 13578954

SEQ ID NO: 109215 - DNA, 2721 bp, Arabidopsis thaliana; identical to SEQ ID NO: 97976
  misc_feature (1)..(2721): Ceres Seq. ID no. 13578971
  misc_feature (1)..(2721): Ortholog of  Ceres SEQ ID NO 15225226 as cited in SEQ ID NO 58693
  misc_feature (1)..(2721): Ortholog of  Ceres SEQ ID NO 13654989 as cited in SEQ ID NO 63117
  misc_feature (1)..(2721): Ortholog of  Ceres SEQ ID NO 13584744 as cited in SEQ ID NO 69137

SEQ ID NO: 109216 - protein, 725 aa, Arabidopsis thaliana; identical to SEQ ID NO: 48790
  peptide (1)..(725): Ceres Seq. ID no. 13578972

SEQ ID NO: 109217 - protein, 707 aa, Arabidopsis thaliana; identical to SEQ ID NO: 48791
  peptide (1)..(707): Ceres Seq. ID no. 13578973

SEQ ID NO: 109218 - protein, 615 aa, Arabidopsis thaliana; identical to SEQ ID NO: 48792
  peptide (1)..(615): Ceres Seq. ID no. 13578974

SEQ ID NO: 109219 - DNA, 2598 bp, Arabidopsis thaliana; identical to SEQ ID NO: 97980
  misc_feature (1)..(2598): Ceres Seq. ID no. 13578980
  misc_feature (1)..(2598): Ortholog of  Ceres SEQ ID NO 13598023 as cited in SEQ ID NO 66487

SEQ ID NO: 109220 - protein, 793 aa, Arabidopsis thaliana; identical to SEQ ID NO: 97981
  peptide (1)..(793): Ceres Seq. ID no. 13578981

SEQ ID NO: 109221 - protein, 699 aa, Arabidopsis thaliana; identical to SEQ ID NO: 97982
  peptide (1)..(699): Ceres Seq. ID no. 13578982

SEQ ID NO: 109222 - protein, 689 aa, Arabidopsis thaliana; identical to SEQ ID NO: 97983
  peptide (1)..(689): Ceres Seq. ID no. 13578983

SEQ ID NO: 109223 - DNA, 1197 bp, Arabidopsis thaliana; identical to SEQ ID NO: 97984
  misc_feature (1)..(1197): Ceres Seq. ID no. 13579055
  misc_feature (1)..(1197): Ortholog of  Ceres SEQ ID NO 14302216 as cited in SEQ ID NO 66456

SEQ ID NO: 109224 - protein, 326 aa, Arabidopsis thaliana; identical to SEQ ID NO: 97985
  peptide (1)..(326): Ceres Seq. ID no. 13579056

SEQ ID NO: 109225 - protein, 320 aa, Arabidopsis thaliana; identical to SEQ ID NO: 97986
  peptide (1)..(320): Ceres Seq. ID no. 13579057

SEQ ID NO: 109226 - protein, 267 aa, Arabidopsis thaliana; identical to SEQ ID NO: 97987
  peptide (1)..(267): Ceres Seq. ID no. 13579058

SEQ ID NO: 109227 - DNA, 3234 bp, Arabidopsis thaliana; identical to SEQ ID NO: 97988
  misc_feature (1)..(3234): Ceres Seq. ID no. 13579066
  misc_feature (1)..(3234): Ortholog of  Ceres SEQ ID NO 14310259 as cited in SEQ ID NO 20662
  misc_feature (1)..(3234): Ortholog of  Ceres SEQ ID NO 12586556 as cited in SEQ ID NO 64667
  misc_feature (1)..(3234): Ortholog of  Ceres SEQ ID NO 13660894 as cited in SEQ ID NO 67475

SEQ ID NO: 109228 - protein, 1077 aa, Arabidopsis thaliana; identical to SEQ ID NO: 97989
  peptide (1)..(1077): Ceres Seq. ID no. 13579067

SEQ ID NO: 109229 - protein, 1053 aa, Arabidopsis thaliana; identical to SEQ ID NO: 97990
  peptide (1)..(1053): Ceres Seq. ID no. 13579068

SEQ ID NO: 109230 - protein, 1045 aa, Arabidopsis thaliana; identical to SEQ ID NO: 97991
  peptide (1)..(1045): Ceres Seq. ID no. 13579069

SEQ ID NO: 109231 - DNA, 1393 bp, Arabidopsis thaliana; identical to SEQ ID NO: 97992
  misc_feature (1)..(1393): Ceres Seq. ID no. 13579082
  misc_feature (1)..(1393): Ortholog of  Ceres SEQ ID NO 13654989 as cited in SEQ ID NO 63117
  misc_feature (1)..(1393): Ortholog of  Ceres SEQ ID NO 13657138 as cited in SEQ ID NO 65923
  misc_feature (1)..(1393): Ortholog of  Ceres SEQ ID NO 13584744 as cited in SEQ ID NO 69137

SEQ ID NO: 109232 - protein, 361 aa, Arabidopsis thaliana; identical to SEQ ID NO: 97993
  peptide (1)..(361): Ceres Seq. ID no. 13579083

SEQ ID NO: 109233 - protein, 246 aa, Arabidopsis thaliana; identical to SEQ ID NO: 97994
  peptide (1)..(246): Ceres Seq. ID no. 13579084

SEQ ID NO: 109234 - protein, 215 aa, Arabidopsis thaliana; identical to SEQ ID NO: 97995
  peptide (1)..(215): Ceres Seq. ID no. 13579085

SEQ ID NO: 109235 - DNA, 2126 bp, Arabidopsis thaliana; identical to SEQ ID NO: 97996
  misc_feature (1)..(2126): Ceres Seq. ID no. 13579167
  misc_feature (1)..(2126): Ortholog of  Ceres SEQ ID NO 13655755 as cited in SEQ ID NO 65117

SEQ ID NO: 109236 - protein, 640 aa, Arabidopsis thaliana; identical to SEQ ID NO: 97997
  peptide (1)..(640): Ceres Seq. ID no. 13579168

SEQ ID NO: 109237 - protein, 610 aa, Arabidopsis thaliana; identical to SEQ ID NO: 97998
  peptide (1)..(610): Ceres Seq. ID no. 13579169

SEQ ID NO: 109238 - protein, 584 aa, Arabidopsis thaliana; identical to SEQ ID NO: 97999
  peptide (1)..(584): Ceres Seq. ID no. 13579170

SEQ ID NO: 109239 - DNA, 1490 bp, Arabidopsis thaliana; identical to SEQ ID NO: 98000
  misc_feature (1)..(1490): Ceres Seq. ID no. 13579183
  misc_feature (1)..(1490): Ortholog of  Ceres SEQ ID NO 14310037 as cited in SEQ ID NO 20603

SEQ ID NO: 109240 - protein, 451 aa, Arabidopsis thaliana; identical to SEQ ID NO: 98001
  peptide (1)..(451): Ceres Seq. ID no. 13579184

SEQ ID NO: 109241 - protein, 401 aa, Arabidopsis thaliana; identical to SEQ ID NO: 98002
  peptide (1)..(401): Ceres Seq. ID no. 13579185

SEQ ID NO: 109242 - protein, 375 aa, Arabidopsis thaliana; identical to SEQ ID NO: 98003
  peptide (1)..(375): Ceres Seq. ID no. 13579186

SEQ ID NO: 109243 - DNA, 2394 bp, Arabidopsis thaliana; identical to SEQ ID NO: 98004
  misc_feature (1)..(2394): Ceres Seq. ID no. 13579221
  misc_feature (1)..(2394): Ortholog of  Ceres SEQ ID NO 15180156 as cited in SEQ ID NO 0

SEQ ID NO: 109244 - protein, 581 aa, Arabidopsis thaliana; identical to SEQ ID NO: 98005
  peptide (1)..(581): Ceres Seq. ID no. 13579222

SEQ ID NO: 109245 - protein, 543 aa, Arabidopsis thaliana; identical to SEQ ID NO: 98006
  peptide (1)..(543): Ceres Seq. ID no. 13579223

SEQ ID NO: 109246 - protein, 521 aa, Arabidopsis thaliana; identical to SEQ ID NO: 98007
  peptide (1)..(521): Ceres Seq. ID no. 13579224

SEQ ID NO: 109247 - DNA, 2509 bp, Arabidopsis thaliana; identical to SEQ ID NO: 98008
  misc_feature (1)..(2509): Ceres Seq. ID no. 13579233
  misc_feature (1)..(2509): Ortholog of  Ceres SEQ ID NO 13657138 as cited in SEQ ID NO 65923
  misc_feature (1)..(2509): Ortholog of  Ceres SEQ ID NO 13584744 as cited in SEQ ID NO 69137

SEQ ID NO: 109248 - protein, 705 aa, Arabidopsis thaliana; identical to SEQ ID NO: 98009
  peptide (1)..(705): Ceres Seq. ID no. 13579234

SEQ ID NO: 109249 - protein, 630 aa, Arabidopsis thaliana; identical to SEQ ID NO: 98010
  peptide (1)..(630): Ceres Seq. ID no. 13579235

SEQ ID NO: 109250 - protein, 549 aa, Arabidopsis thaliana; identical to SEQ ID NO: 98011
  peptide (1)..(549): Ceres Seq. ID no. 13579236

SEQ ID NO: 109251 - DNA, 1443 bp, Arabidopsis thaliana; identical to SEQ ID NO: 98012
  misc_feature (1)..(1443): Ceres Seq. ID no. 13579245
  misc_feature (1)..(1443): Ortholog of  Ceres SEQ ID NO 12625388 as cited in SEQ ID NO 63299
  misc_feature (1)..(1443): Ortholog of  Ceres SEQ ID NO 15179860 as cited in SEQ ID NO 66716

SEQ ID NO: 109252 - protein, 403 aa, Arabidopsis thaliana; identical to SEQ ID NO: 98013
  peptide (1)..(403): Ceres Seq. ID no. 13579246

SEQ ID NO: 109253 - protein, 240 aa, Arabidopsis thaliana; identical to SEQ ID NO: 98014
  peptide (1)..(240): Ceres Seq. ID no. 13579247

SEQ ID NO: 109254 - DNA, 1546 bp, Arabidopsis thaliana; identical to SEQ ID NO: 98015
  misc_feature (1)..(1546): Ceres Seq. ID no. 13579300
  misc_feature (1)..(1546): Ortholog of  Ceres SEQ ID NO 13659033 as cited in SEQ ID NO 66372

SEQ ID NO: 109255 - protein, 434 aa, Arabidopsis thaliana; identical to SEQ ID NO: 98016
  peptide (1)..(434): Ceres Seq. ID no. 13579301

SEQ ID NO: 109256 - protein, 412 aa, Arabidopsis thaliana; identical to SEQ ID NO: 45103
  peptide (1)..(412): Ceres Seq. ID no. 13579302

SEQ ID NO: 109257 - protein, 269 aa, Arabidopsis thaliana; identical to SEQ ID NO: 45104
  peptide (1)..(269): Ceres Seq. ID no. 13579303

SEQ ID NO: 109258 - DNA, 2290 bp, Arabidopsis thaliana; identical to SEQ ID NO: 98019
  misc_feature (1)..(2290): Ceres Seq. ID no. 13579309
  misc_feature (1)..(2290): Ortholog of  Ceres SEQ ID NO 13600220 as cited in SEQ ID NO 0

SEQ ID NO: 109259 - protein, 370 aa, Arabidopsis thaliana; identical to SEQ ID NO: 98020
  peptide (1)..(370): Ceres Seq. ID no. 13579310

SEQ ID NO: 109260 - protein, 366 aa, Arabidopsis thaliana; identical to SEQ ID NO: 98021
  peptide (1)..(366): Ceres Seq. ID no. 13579311

SEQ ID NO: 109261 - protein, 313 aa, Arabidopsis thaliana; identical to SEQ ID NO: 98022
  peptide (1)..(313): Ceres Seq. ID no. 13579312

SEQ ID NO: 109262 - DNA, 1105 bp, Arabidopsis thaliana; identical to SEQ ID NO: 98023
  misc_feature (1)..(1105): Ceres Seq. ID no. 13579321
  misc_feature (1)..(1105): Ortholog of  Ceres SEQ ID NO 15173851 as cited in SEQ ID NO 57413

SEQ ID NO: 109263 - protein, 250 aa, Arabidopsis thaliana; identical to SEQ ID NO: 98024
  peptide (1)..(250): Ceres Seq. ID no. 13579322

SEQ ID NO: 109264 - protein, 134 aa, Arabidopsis thaliana; identical to SEQ ID NO: 98025
  peptide (1)..(134): Ceres Seq. ID no. 13579323

SEQ ID NO: 109265 - DNA, 1443 bp, Arabidopsis thaliana; identical to SEQ ID NO: 98026
  misc_feature (1)..(1443): Ceres Seq. ID no. 13579328
  misc_feature (1)..(1443): Ortholog of  Ceres SEQ ID NO 15176317 as cited in SEQ ID NO 52865
  misc_feature (1)..(1443): Ortholog of  Ceres SEQ ID NO 13518893 as cited in SEQ ID NO 58108
  misc_feature (1)..(1443): Ortholog of  Ceres SEQ ID NO 12617152 as cited in SEQ ID NO 63555

SEQ ID NO: 109266 - protein, 358 aa, Arabidopsis thaliana; identical to SEQ ID NO: 86160
  peptide (1)..(358): Ceres Seq. ID no. 13579329

SEQ ID NO: 109267 - protein, 342 aa, Arabidopsis thaliana; identical to SEQ ID NO: 86161
  peptide (1)..(342): Ceres Seq. ID no. 13579330

SEQ ID NO: 109268 - protein, 307 aa, Arabidopsis thaliana; identical to SEQ ID NO: 86162
  peptide (1)..(307): Ceres Seq. ID no. 13579331

SEQ ID NO: 109269 - DNA, 797 bp, Arabidopsis thaliana; identical to SEQ ID NO: 98030
  misc_feature (1)..(797): Ceres Seq. ID no. 13579340
  misc_feature (1)..(797): Ortholog of  Ceres SEQ ID NO 13660598 as cited in SEQ ID NO 67591

SEQ ID NO: 109270 - protein, 171 aa, Arabidopsis thaliana; identical to SEQ ID NO: 38308
  peptide (1)..(171): Ceres Seq. ID no. 13579341

SEQ ID NO: 109271 - protein, 157 aa, Arabidopsis thaliana; identical to SEQ ID NO: 38309
  peptide (1)..(157): Ceres Seq. ID no. 13579342

SEQ ID NO: 109272 - protein, 145 aa, Arabidopsis thaliana; identical to SEQ ID NO: 38310
  peptide (1)..(145): Ceres Seq. ID no. 13579343

SEQ ID NO: 109273 - DNA, 1287 bp, Arabidopsis thaliana; identical to SEQ ID NO: 98034
  misc_feature (1)..(1287): Ceres Seq. ID no. 13579352
  misc_feature (1)..(1287): Ortholog of  Ceres SEQ ID NO 13597476 as cited in SEQ ID NO 65132

SEQ ID NO: 109274 - protein, 373 aa, Arabidopsis thaliana; identical to SEQ ID NO: 98035
  peptide (1)..(373): Ceres Seq. ID no. 13579353

SEQ ID NO: 109275 - protein, 348 aa, Arabidopsis thaliana; identical to SEQ ID NO: 98036
  peptide (1)..(348): Ceres Seq. ID no. 13579354

SEQ ID NO: 109276 - protein, 269 aa, Arabidopsis thaliana; identical to SEQ ID NO: 98037
  peptide (1)..(269): Ceres Seq. ID no. 13579355

SEQ ID NO: 109277 - DNA, 1745 bp, Arabidopsis thaliana; identical to SEQ ID NO: 98038
  misc_feature (1)..(1745): Ceres Seq. ID no. 13579366
  misc_feature (1)..(1745): Ortholog of  Ceres SEQ ID NO 13595900 as cited in SEQ ID NO 69289

SEQ ID NO: 109278 - protein, 415 aa, Arabidopsis thaliana; identical to SEQ ID NO: 98039
  peptide (1)..(415): Ceres Seq. ID no. 13579367

SEQ ID NO: 109279 - protein, 334 aa, Arabidopsis thaliana; identical to SEQ ID NO: 98040
  peptide (1)..(334): Ceres Seq. ID no. 13579368

SEQ ID NO: 109280 - protein, 309 aa, Arabidopsis thaliana; identical to SEQ ID NO: 98041
  peptide (1)..(309): Ceres Seq. ID no. 13579369

SEQ ID NO: 109281 - DNA, 1533 bp, Arabidopsis thaliana; identical to SEQ ID NO: 98042
  misc_feature (1)..(1533): Ceres Seq. ID no. 13579374
  misc_feature (1)..(1533): Ortholog of  Ceres SEQ ID NO 13593889 as cited in SEQ ID NO 53305
  misc_feature (1)..(1533): Ortholog of  Ceres SEQ ID NO 13581959 as cited in SEQ ID NO 56156

SEQ ID NO: 109282 - protein, 411 aa, Arabidopsis thaliana; identical to SEQ ID NO: 36421
  peptide (1)..(411): Ceres Seq. ID no. 13579375

SEQ ID NO: 109283 - protein, 374 aa, Arabidopsis thaliana; identical to SEQ ID NO: 36422
  peptide (1)..(374): Ceres Seq. ID no. 13579376

SEQ ID NO: 109284 - protein, 232 aa, Arabidopsis thaliana; identical to SEQ ID NO: 36423
  peptide (1)..(232): Ceres Seq. ID no. 13579377

SEQ ID NO: 109285 - DNA, 1824 bp, Arabidopsis thaliana; identical to SEQ ID NO: 98046
  misc_feature (1)..(1824): Ceres Seq. ID no. 13579380
  misc_feature (1)..(1824): Ortholog of  Ceres SEQ ID NO 13660287 as cited in SEQ ID NO 67316

SEQ ID NO: 109286 - protein, 271 aa, Arabidopsis thaliana; identical to SEQ ID NO: 98047
  peptide (1)..(271): Ceres Seq. ID no. 13579381

SEQ ID NO: 109287 - protein, 265 aa, Arabidopsis thaliana; identical to SEQ ID NO: 98048
  peptide (1)..(265): Ceres Seq. ID no. 13579382

SEQ ID NO: 109288 - protein, 237 aa, Arabidopsis thaliana; identical to SEQ ID NO: 98049
  peptide (1)..(237): Ceres Seq. ID no. 13579383

SEQ ID NO: 109289 - DNA, 1105 bp, Arabidopsis thaliana; identical to SEQ ID NO: 98050
  misc_feature (1)..(1105): Ceres Seq. ID no. 13579388
  misc_feature (1)..(1105): Ortholog of  Ceres SEQ ID NO 13662949 as cited in SEQ ID NO 64276

SEQ ID NO: 109290 - protein, 223 aa, Arabidopsis thaliana; identical to SEQ ID NO: 86087
  peptide (1)..(223): Ceres Seq. ID no. 13579389

SEQ ID NO: 109291 - protein, 199 aa, Arabidopsis thaliana; identical to SEQ ID NO: 86088
  peptide (1)..(199): Ceres Seq. ID no. 13579390

SEQ ID NO: 109292 - protein, 159 aa, Arabidopsis thaliana; identical to SEQ ID NO: 86089
  peptide (1)..(159): Ceres Seq. ID no. 13579391

SEQ ID NO: 109293 - DNA, 1613 bp, Arabidopsis thaliana; identical to SEQ ID NO: 98054
  misc_feature (1)..(1613): Ceres Seq. ID no. 13579395
  misc_feature (1)..(1613): Ortholog of  Ceres SEQ ID NO 14302734 as cited in SEQ ID NO 66748

SEQ ID NO: 109294 - protein, 372 aa, Arabidopsis thaliana; identical to SEQ ID NO: 98055
  peptide (1)..(372): Ceres Seq. ID no. 13579396

SEQ ID NO: 109295 - DNA, 1812 bp, Arabidopsis thaliana; identical to SEQ ID NO: 98056
  misc_feature (1)..(1812): Ceres Seq. ID no. 13579397
  misc_feature (1)..(1812): Ortholog of  Ceres SEQ ID NO 13599900 as cited in SEQ ID NO 531
  misc_feature (1)..(1812): Ortholog of  Ceres SEQ ID NO 14304811 as cited in SEQ ID NO 53097
  misc_feature (1)..(1812): Ortholog of  Ceres SEQ ID NO 13659971 as cited in SEQ ID NO 67565
  misc_feature (1)..(1812): Ortholog of  Ceres SEQ ID NO 13500385 as cited in SEQ ID NO 67583

SEQ ID NO: 109296 - protein, 471 aa, Arabidopsis thaliana; identical to SEQ ID NO: 80387
  peptide (1)..(471): Ceres Seq. ID no. 13579398

SEQ ID NO: 109297 - protein, 424 aa, Arabidopsis thaliana; identical to SEQ ID NO: 80388
  peptide (1)..(424): Ceres Seq. ID no. 13579399

SEQ ID NO: 109298 - protein, 385 aa, Arabidopsis thaliana; identical to SEQ ID NO: 80389
  peptide (1)..(385): Ceres Seq. ID no. 13579400

SEQ ID NO: 109299 - DNA, 1236 bp, Arabidopsis thaliana; identical to SEQ ID NO: 98060
  misc_feature (1)..(1236): Ceres Seq. ID no. 13579413
  misc_feature (1)..(1236): Ortholog of  Ceres SEQ ID NO 12336358 as cited in SEQ ID NO 20733
  misc_feature (1)..(1236): Ortholog of  Ceres SEQ ID NO 12623467 as cited in SEQ ID NO 60951
  misc_feature (1)..(1236): Ortholog of  Ceres SEQ ID NO 14309133 as cited in SEQ ID NO 0

SEQ ID NO: 109300 - protein, 361 aa, Arabidopsis thaliana; identical to SEQ ID NO: 98061
  peptide (1)..(361): Ceres Seq. ID no. 13579414

SEQ ID NO: 109301 - protein, 321 aa, Arabidopsis thaliana; identical to SEQ ID NO: 86339
  peptide (1)..(321): Ceres Seq. ID no. 13579415

SEQ ID NO: 109302 - protein, 295 aa, Arabidopsis thaliana; identical to SEQ ID NO: 86340
  peptide (1)..(295): Ceres Seq. ID no. 13579416

SEQ ID NO: 109303 - DNA, 439 bp, Arabidopsis thaliana; identical to SEQ ID NO: 98064
  misc_feature (1)..(439): Ceres Seq. ID no. 13579417
  misc_feature (1)..(439): Ortholog of  Ceres SEQ ID NO 13593557 as cited in SEQ ID NO 175

SEQ ID NO: 109304 - protein, 92 aa, Arabidopsis thaliana; identical to SEQ ID NO: 98065
  peptide (1)..(92): Ceres Seq. ID no. 13579418

SEQ ID NO: 109305 - protein, 84 aa, Arabidopsis thaliana; identical to SEQ ID NO: 27916
  peptide (1)..(84): Ceres Seq. ID no. 13579419

SEQ ID NO: 109306 - protein, 81 aa, Arabidopsis thaliana; identical to SEQ ID NO: 27917
  peptide (1)..(81): Ceres Seq. ID no. 13579420

SEQ ID NO: 109307 - DNA, 1904 bp, Arabidopsis thaliana; identical to SEQ ID NO: 98068
  misc_feature (1)..(1904): Ceres Seq. ID no. 13579424
  misc_feature (1)..(1904): Ortholog of  Ceres SEQ ID NO 15169627 as cited in SEQ ID NO 64517
  misc_feature (1)..(1904): Ortholog of  Ceres SEQ ID NO 14307952 as cited in SEQ ID NO 66029
  misc_feature (1)..(1904): Ortholog of  Ceres SEQ ID NO 12614124 as cited in SEQ ID NO 68392

SEQ ID NO: 109308 - protein, 520 aa, Arabidopsis thaliana; identical to SEQ ID NO: 98069
  peptide (1)..(520): Ceres Seq. ID no. 15222681

SEQ ID NO: 109309 - protein, 512 aa, Arabidopsis thaliana; identical to SEQ ID NO: 98070
  peptide (1)..(512): Ceres Seq. ID no. 15222682

SEQ ID NO: 109310 - protein, 331 aa, Arabidopsis thaliana; identical to SEQ ID NO: 98071
  peptide (1)..(331): Ceres Seq. ID no. 15222683

SEQ ID NO: 109311 - DNA, 2967 bp, Arabidopsis thaliana; identical to SEQ ID NO: 98072
  misc_feature (1)..(2967): Ceres Seq. ID no. 13579425
  misc_feature (1)..(2967): Ortholog of  Ceres SEQ ID NO 13648449 as cited in SEQ ID NO 171
  misc_feature (1)..(2967): Ortholog of  Ceres SEQ ID NO 15176325 as cited in SEQ ID NO 52802
  misc_feature (1)..(2967): Ortholog of  Ceres SEQ ID NO 15176313 as cited in SEQ ID NO 52831

SEQ ID NO: 109312 - protein, 937 aa, Arabidopsis thaliana; identical to SEQ ID NO: 98073
  peptide (1)..(937): Ceres Seq. ID no. 13579426

SEQ ID NO: 109313 - protein, 876 aa, Arabidopsis thaliana; identical to SEQ ID NO: 98074
  peptide (1)..(876): Ceres Seq. ID no. 13579427

SEQ ID NO: 109314 - protein, 868 aa, Arabidopsis thaliana; identical to SEQ ID NO: 98075
  peptide (1)..(868): Ceres Seq. ID no. 13579428

SEQ ID NO: 109315 - DNA, 1514 bp, Arabidopsis thaliana; identical to SEQ ID NO: 98076
  misc_feature (1)..(1514): Ceres Seq. ID no. 13579429
  misc_feature (1)..(1514): Ortholog of  Ceres SEQ ID NO 13638769 as cited in SEQ ID NO 51773
  misc_feature (1)..(1514): Ortholog of  Ceres SEQ ID NO 12583723 as cited in SEQ ID NO 58297
  misc_feature (1)..(1514): Ortholog of  Ceres SEQ ID NO 12623263 as cited in SEQ ID NO 60988
  misc_feature (1)..(1514): Ortholog of  Ceres SEQ ID NO 15225568 as cited in SEQ ID NO 61512
  misc_feature (1)..(1514): Ortholog of  Ceres SEQ ID NO 13590249 as cited in SEQ ID NO 68385
  misc_feature (1)..(1514): Ortholog of  Ceres SEQ ID NO 12635807 as cited in SEQ ID NO 0
  misc_feature (1)..(1514): Ortholog of  Ceres SEQ ID NO 15179245 as cited in SEQ ID NO 0

SEQ ID NO: 109316 - protein, 148 aa, Arabidopsis thaliana; identical to SEQ ID NO: 35508
  peptide (1)..(148): Ceres Seq. ID no. 13579430

SEQ ID NO: 109317 - protein, 97 aa, Arabidopsis thaliana; identical to SEQ ID NO: 35509
  peptide (1)..(97): Ceres Seq. ID no. 13579431

SEQ ID NO: 109318 - protein, 79 aa, Arabidopsis thaliana; identical to SEQ ID NO: 79492
  peptide (1)..(79): Ceres Seq. ID no. 13579432

SEQ ID NO: 109319 - DNA, 505 bp, Arabidopsis thaliana; identical to SEQ ID NO: 98080
  misc_feature (1)..(505): Ceres Seq. ID no. 13579433
  misc_feature (1)..(505): Ortholog of  Ceres SEQ ID NO 13595226 as cited in SEQ ID NO 56331
  misc_feature (1)..(505): Ortholog of  Ceres SEQ ID NO 13661903 as cited in SEQ ID NO 61722
  misc_feature (1)..(505): Ortholog of  Ceres SEQ ID NO 15173940 as cited in SEQ ID NO 61934

SEQ ID NO: 109320 - protein, 122 aa, Arabidopsis thaliana; identical to SEQ ID NO: 98081
  peptide (1)..(122): Ceres Seq. ID no. 13579434

SEQ ID NO: 109321 - protein, 110 aa, Arabidopsis thaliana; identical to SEQ ID NO: 98082
  peptide (1)..(110): Ceres Seq. ID no. 13579435

SEQ ID NO: 109322 - DNA, 877 bp, Arabidopsis thaliana; identical to SEQ ID NO: 98083
  misc_feature (1)..(877): Ceres Seq. ID no. 13579436
  misc_feature (1)..(877): Ortholog of  Ceres SEQ ID NO 13599586 as cited in SEQ ID NO 0

SEQ ID NO: 109323 - protein, 193 aa, Arabidopsis thaliana; identical to SEQ ID NO: 28903
  peptide (1)..(193): Ceres Seq. ID no. 13579437

SEQ ID NO: 109324 - protein, 183 aa, Arabidopsis thaliana; identical to SEQ ID NO: 28904
  peptide (1)..(183): Ceres Seq. ID no. 13579438

SEQ ID NO: 109325 - protein, 102 aa, Arabidopsis thaliana; identical to SEQ ID NO: 28905
  peptide (1)..(102): Ceres Seq. ID no. 13579439

SEQ ID NO: 109326 - DNA, 1205 bp, Arabidopsis thaliana; identical to SEQ ID NO: 98087
  misc_feature (1)..(1205): Ceres Seq. ID no. 13579447
  misc_feature (1)..(1205): Ortholog of  Ceres SEQ ID NO 14308536 as cited in SEQ ID NO 55469
  misc_feature (1)..(1205): Ortholog of  Ceres SEQ ID NO 15179772 as cited in SEQ ID NO 64248

SEQ ID NO: 109327 - protein, 317 aa, Arabidopsis thaliana; identical to SEQ ID NO: 24612
  peptide (1)..(317): Ceres Seq. ID no. 13579448

SEQ ID NO: 109328 - protein, 312 aa, Arabidopsis thaliana; identical to SEQ ID NO: 24613
  peptide (1)..(312): Ceres Seq. ID no. 13579449

SEQ ID NO: 109329 - protein, 279 aa, Arabidopsis thaliana; identical to SEQ ID NO: 24614
  peptide (1)..(279): Ceres Seq. ID no. 13579450

SEQ ID NO: 109330 - DNA, 1618 bp, Arabidopsis thaliana; identical to SEQ ID NO: 98091
  misc_feature (1)..(1618): Ceres Seq. ID no. 13579470
  misc_feature (1)..(1618): Ortholog of  Ceres SEQ ID NO 13597269 as cited in SEQ ID NO 63932

SEQ ID NO: 109331 - protein, 439 aa, Arabidopsis thaliana; identical to SEQ ID NO: 98092
  peptide (1)..(439): Ceres Seq. ID no. 13579471

SEQ ID NO: 109332 - protein, 423 aa, Arabidopsis thaliana; identical to SEQ ID NO: 98093
  peptide (1)..(423): Ceres Seq. ID no. 13579472

SEQ ID NO: 109333 - protein, 381 aa, Arabidopsis thaliana; identical to SEQ ID NO: 98094
  peptide (1)..(381): Ceres Seq. ID no. 13579473

SEQ ID NO: 109334 - DNA, 2044 bp, Arabidopsis thaliana; identical to SEQ ID NO: 98095
  misc_feature (1)..(2044): Ceres Seq. ID no. 13579477
  misc_feature (1)..(2044): Ortholog of  Ceres SEQ ID NO 13599900 as cited in SEQ ID NO 531
  misc_feature (1)..(2044): Ortholog of  Ceres SEQ ID NO 13659971 as cited in SEQ ID NO 67565
  misc_feature (1)..(2044): Ortholog of  Ceres SEQ ID NO 13500385 as cited in SEQ ID NO 67583

SEQ ID NO: 109335 - protein, 491 aa, Arabidopsis thaliana; identical to SEQ ID NO: 27923
  peptide (1)..(491): Ceres Seq. ID no. 13579478

SEQ ID NO: 109336 - protein, 488 aa, Arabidopsis thaliana; identical to SEQ ID NO: 27924
  peptide (1)..(488): Ceres Seq. ID no. 13579479

SEQ ID NO: 109337 - protein, 417 aa, Arabidopsis thaliana; identical to SEQ ID NO: 27925
  peptide (1)..(417): Ceres Seq. ID no. 13579480

SEQ ID NO: 109338 - DNA, 1131 bp, Arabidopsis thaliana; identical to SEQ ID NO: 98099
  misc_feature (1)..(1131): Ceres Seq. ID no. 13579481
  misc_feature (1)..(1131): Ortholog of  Ceres SEQ ID NO 15170881 as cited in SEQ ID NO 54654

SEQ ID NO: 109339 - protein, 313 aa, Arabidopsis thaliana; identical to SEQ ID NO: 98100
  peptide (1)..(313): Ceres Seq. ID no. 13579482

SEQ ID NO: 109340 - protein, 270 aa, Arabidopsis thaliana; identical to SEQ ID NO: 98101
  peptide (1)..(270): Ceres Seq. ID no. 13579483

SEQ ID NO: 109341 - protein, 197 aa, Arabidopsis thaliana; identical to SEQ ID NO: 27602
  peptide (1)..(197): Ceres Seq. ID no. 13579484

SEQ ID NO: 109342 - DNA, 935 bp, Arabidopsis thaliana; identical to SEQ ID NO: 98103
  misc_feature (1)..(935): Ceres Seq. ID no. 13579485
  misc_feature (1)..(935): Ortholog of  Ceres SEQ ID NO 13597542 as cited in SEQ ID NO 64986

SEQ ID NO: 109343 - protein, 250 aa, Arabidopsis thaliana; identical to SEQ ID NO: 98104
  peptide (1)..(250): Ceres Seq. ID no. 13579486

SEQ ID NO: 109344 - protein, 223 aa, Arabidopsis thaliana; identical to SEQ ID NO: 76370
  peptide (1)..(223): Ceres Seq. ID no. 13579487

SEQ ID NO: 109345 - protein, 201 aa, Arabidopsis thaliana; identical to SEQ ID NO: 26204
  peptide (1)..(201): Ceres Seq. ID no. 13579488

SEQ ID NO: 109346 - DNA, 1512 bp, Arabidopsis thaliana; identical to SEQ ID NO: 98107
  misc_feature (1)..(1512): Ceres Seq. ID no. 13579489
  misc_feature (1)..(1512): Ortholog of  Ceres SEQ ID NO 15179926 as cited in SEQ ID NO 57010
  misc_feature (1)..(1512): Ortholog of  Ceres SEQ ID NO 14316075 as cited in SEQ ID NO 60059

SEQ ID NO: 109347 - protein, 346 aa, Arabidopsis thaliana; identical to SEQ ID NO: 24734
  peptide (1)..(346): Ceres Seq. ID no. 13579490

SEQ ID NO: 109348 - protein, 315 aa, Arabidopsis thaliana; identical to SEQ ID NO: 24735
  peptide (1)..(315): Ceres Seq. ID no. 13579491

SEQ ID NO: 109349 - protein, 256 aa, Arabidopsis thaliana; identical to SEQ ID NO: 24736
  peptide (1)..(256): Ceres Seq. ID no. 13579492

SEQ ID NO: 109350 - DNA, 1506 bp, Arabidopsis thaliana; identical to SEQ ID NO: 98111
  misc_feature (1)..(1506): Ceres Seq. ID no. 13579493
  misc_feature (1)..(1506): Ortholog of  Ceres SEQ ID NO 15176959 as cited in SEQ ID NO 52610

SEQ ID NO: 109351 - protein, 408 aa, Arabidopsis thaliana; identical to SEQ ID NO: 98112
  peptide (1)..(408): Ceres Seq. ID no. 13579494

SEQ ID NO: 109352 - protein, 371 aa, Arabidopsis thaliana; identical to SEQ ID NO: 98113
  peptide (1)..(371): Ceres Seq. ID no. 13579495

SEQ ID NO: 109353 - DNA, 1128 bp, Arabidopsis thaliana; identical to SEQ ID NO: 98114
  misc_feature (1)..(1128): Ceres Seq. ID no. 13579496
  misc_feature (1)..(1128): Ortholog of  Ceres SEQ ID NO 15171289 as cited in SEQ ID NO 51570

SEQ ID NO: 109354 - protein, 317 aa, Arabidopsis thaliana; identical to SEQ ID NO: 98115
  peptide (1)..(317): Ceres Seq. ID no. 13579497

SEQ ID NO: 109355 - protein, 304 aa, Arabidopsis thaliana; identical to SEQ ID NO: 98116
  peptide (1)..(304): Ceres Seq. ID no. 13579498

SEQ ID NO: 109356 - protein, 285 aa, Arabidopsis thaliana; identical to SEQ ID NO: 98117
  peptide (1)..(285): Ceres Seq. ID no. 13579499

SEQ ID NO: 109357 - DNA, 1062 bp, Arabidopsis thaliana; identical to SEQ ID NO: 98118
  misc_feature (1)..(1062): Ceres Seq. ID no. 13579500
  misc_feature (1)..(1062): Ortholog of  Ceres SEQ ID NO 15178181 as cited in SEQ ID NO 58740
  misc_feature (1)..(1062): Ortholog of  Ceres SEQ ID NO 12614739 as cited in SEQ ID NO 68587

SEQ ID NO: 109358 - protein, 353 aa, Arabidopsis thaliana; identical to SEQ ID NO: 78395
  peptide (1)..(353): Ceres Seq. ID no. 13579501

SEQ ID NO: 109359 - DNA, 1168 bp, Arabidopsis thaliana; identical to SEQ ID NO: 98120
  misc_feature (1)..(1168): Ceres Seq. ID no. 13579510
  misc_feature (1)..(1168): Ortholog of  Ceres SEQ ID NO 14306201 as cited in SEQ ID NO 59956

SEQ ID NO: 109360 - protein, 266 aa, Arabidopsis thaliana; identical to SEQ ID NO: 98121
  peptide (1)..(266): Ceres Seq. ID no. 13579511

SEQ ID NO: 109361 - protein, 204 aa, Arabidopsis thaliana; identical to SEQ ID NO: 23131
  peptide (1)..(204): Ceres Seq. ID no. 13579512

SEQ ID NO: 109362 - protein, 144 aa, Arabidopsis thaliana; identical to SEQ ID NO: 23132
  peptide (1)..(144): Ceres Seq. ID no. 13579513

SEQ ID NO: 109363 - DNA, 1638 bp, Arabidopsis thaliana; identical to SEQ ID NO: 98124
  misc_feature (1)..(1638): Ceres Seq. ID no. 13579514
  misc_feature (1)..(1638): Ortholog of  Ceres SEQ ID NO 13664362 as cited in SEQ ID NO 66523

SEQ ID NO: 109364 - protein, 378 aa, Arabidopsis thaliana; identical to SEQ ID NO: 25905
  peptide (1)..(378): Ceres Seq. ID no. 13579515

SEQ ID NO: 109365 - protein, 269 aa, Arabidopsis thaliana; identical to SEQ ID NO: 25906
  peptide (1)..(269): Ceres Seq. ID no. 13579516

SEQ ID NO: 109366 - DNA, 838 bp, Arabidopsis thaliana; identical to SEQ ID NO: 98127
  misc_feature (1)..(838): Ceres Seq. ID no. 13579881
  misc_feature (1)..(838): Ortholog of  Ceres SEQ ID NO 13661994 as cited in SEQ ID NO 60568
  misc_feature (1)..(838): Ortholog of  Ceres SEQ ID NO 12584790 as cited in SEQ ID NO 62648

SEQ ID NO: 109367 - protein, 152 aa, Arabidopsis thaliana; identical to SEQ ID NO: 30521
  peptide (1)..(152): Ceres Seq. ID no. 13579882

SEQ ID NO: 109368 - protein, 143 aa, Arabidopsis thaliana; identical to SEQ ID NO: 30522
  peptide (1)..(143): Ceres Seq. ID no. 13579883

SEQ ID NO: 109369 - protein, 121 aa, Arabidopsis thaliana; identical to SEQ ID NO: 30523
  peptide (1)..(121): Ceres Seq. ID no. 13579884

SEQ ID NO: 109370 - DNA, 1208 bp, Arabidopsis thaliana; identical to SEQ ID NO: 98131
  misc_feature (1)..(1208): Ceres Seq. ID no. 13580667
  misc_feature (1)..(1208): Ortholog of  Ceres SEQ ID NO 15177674 as cited in SEQ ID NO 52629
  misc_feature (1)..(1208): Ortholog of  Ceres SEQ ID NO 13596541 as cited in SEQ ID NO 62372

SEQ ID NO: 109371 - protein, 367 aa, Arabidopsis thaliana; identical to SEQ ID NO: 98132
  peptide (1)..(367): Ceres Seq. ID no. 13580668

SEQ ID NO: 109372 - protein, 296 aa, Arabidopsis thaliana; identical to SEQ ID NO: 98133
  peptide (1)..(296): Ceres Seq. ID no. 13580669

SEQ ID NO: 109373 - protein, 294 aa, Arabidopsis thaliana; identical to SEQ ID NO: 98134
  peptide (1)..(294): Ceres Seq. ID no. 13580670

SEQ ID NO: 109374 - DNA, 1313 bp, Arabidopsis thaliana; identical to SEQ ID NO: 98135
  misc_feature (1)..(1313): Ceres Seq. ID no. 13580671
  misc_feature (1)..(1313): Ortholog of  Ceres SEQ ID NO 15174890 as cited in SEQ ID NO 53624

SEQ ID NO: 109375 - protein, 300 aa, Arabidopsis thaliana; identical to SEQ ID NO: 98136
  peptide (1)..(300): Ceres Seq. ID no. 13580672

SEQ ID NO: 109376 - protein, 232 aa, Arabidopsis thaliana; identical to SEQ ID NO: 98137
  peptide (1)..(232): Ceres Seq. ID no. 13580673

SEQ ID NO: 109377 - protein, 211 aa, Arabidopsis thaliana; identical to SEQ ID NO: 98138
  peptide (1)..(211): Ceres Seq. ID no. 13580674

SEQ ID NO: 109378 - DNA, 1198 bp, Arabidopsis thaliana; identical to SEQ ID NO: 98139
  misc_feature (1)..(1198): Ceres Seq. ID no. 13580678
  misc_feature (1)..(1198): Ortholog of  Ceres SEQ ID NO 14315440 as cited in SEQ ID NO 57161

SEQ ID NO: 109379 - protein, 171 aa, Arabidopsis thaliana; identical to SEQ ID NO: 30637
  peptide (1)..(171): Ceres Seq. ID no. 13580679

SEQ ID NO: 109380 - protein, 136 aa, Arabidopsis thaliana; identical to SEQ ID NO: 30638
  peptide (1)..(136): Ceres Seq. ID no. 13580680

SEQ ID NO: 109381 - protein, 124 aa, Arabidopsis thaliana; identical to SEQ ID NO: 30639
  peptide (1)..(124): Ceres Seq. ID no. 13580681

SEQ ID NO: 109382 - DNA, 874 bp, Arabidopsis thaliana; identical to SEQ ID NO: 98143
  misc_feature (1)..(874): Ceres Seq. ID no. 13580690
  misc_feature (1)..(874): Ortholog of  Ceres SEQ ID NO 13581804 as cited in SEQ ID NO 51424
  misc_feature (1)..(874): Ortholog of  Ceres SEQ ID NO 13663874 as cited in SEQ ID NO 67003

SEQ ID NO: 109383 - protein, 229 aa, Arabidopsis thaliana; identical to SEQ ID NO: 98144
  peptide (1)..(229): Ceres Seq. ID no. 13580691

SEQ ID NO: 109384 - protein, 216 aa, Arabidopsis thaliana; identical to SEQ ID NO: 98145
  peptide (1)..(216): Ceres Seq. ID no. 13580692

SEQ ID NO: 109385 - DNA, 3362 bp, Arabidopsis thaliana; identical to SEQ ID NO: 98146
  misc_feature (1)..(3362): Ceres Seq. ID no. 13580709
  misc_feature (1)..(3362): Ortholog of  Ceres SEQ ID NO 15170151 as cited in SEQ ID NO 53069
  misc_feature (1)..(3362): Ortholog of  Ceres SEQ ID NO 13594209 as cited in SEQ ID NO 59089
  misc_feature (1)..(3362): Ortholog of  Ceres SEQ ID NO 14313084 as cited in SEQ ID NO 59183
  misc_feature (1)..(3362): Ortholog of  Ceres SEQ ID NO 14308041 as cited in SEQ ID NO 62601
  misc_feature (1)..(3362): Ortholog of  Ceres SEQ ID NO 14303546 as cited in SEQ ID NO 64893
  misc_feature (1)..(3362): Ortholog of  Ceres SEQ ID NO 14308007 as cited in SEQ ID NO 65760
  misc_feature (1)..(3362): Ortholog of  Ceres SEQ ID NO 15170163 as cited in SEQ ID NO 66262
  misc_feature (1)..(3362): Ortholog of  Ceres SEQ ID NO 13502874 as cited in SEQ ID NO 66298
  misc_feature (1)..(3362): Ortholog of  Ceres SEQ ID NO 12614124 as cited in SEQ ID NO 68392

SEQ ID NO: 109386 - protein, 500 aa, Arabidopsis thaliana; identical to SEQ ID NO: 72389
  peptide (1)..(500): Ceres Seq. ID no. 13580710

SEQ ID NO: 109387 - protein, 435 aa, Arabidopsis thaliana; identical to SEQ ID NO: 72390
  peptide (1)..(435): Ceres Seq. ID no. 13580711

SEQ ID NO: 109388 - protein, 290 aa, Arabidopsis thaliana; identical to SEQ ID NO: 72391
  peptide (1)..(290): Ceres Seq. ID no. 13580712

SEQ ID NO: 109389 - DNA, 1414 bp, Arabidopsis thaliana; identical to SEQ ID NO: 98150
  misc_feature (1)..(1414): Ceres Seq. ID no. 13580721
  misc_feature (1)..(1414): Ortholog of  Ceres SEQ ID NO 15171386 as cited in SEQ ID NO 51479

SEQ ID NO: 109390 - protein, 177 aa, Arabidopsis thaliana; identical to SEQ ID NO: 98151
  peptide (1)..(177): Ceres Seq. ID no. 13580722

SEQ ID NO: 109391 - protein, 171 aa, Arabidopsis thaliana; identical to SEQ ID NO: 98152
  peptide (1)..(171): Ceres Seq. ID no. 13580723

SEQ ID NO: 109392 - protein, 147 aa, Arabidopsis thaliana; identical to SEQ ID NO: 98153
  peptide (1)..(147): Ceres Seq. ID no. 13580724

SEQ ID NO: 109393 - DNA, 1959 bp, Arabidopsis thaliana; identical to SEQ ID NO: 98154
  misc_feature (1)..(1959): Ceres Seq. ID no. 13580725
  misc_feature (1)..(1959): Ortholog of  Ceres SEQ ID NO 14316459 as cited in SEQ ID NO 57754

SEQ ID NO: 109394 - protein, 136 aa, Arabidopsis thaliana; identical to SEQ ID NO: 79520
  peptide (1)..(136): Ceres Seq. ID no. 13580726

SEQ ID NO: 109395 - protein, 98 aa, Arabidopsis thaliana; identical to SEQ ID NO: 79521
  peptide (1)..(98): Ceres Seq. ID no. 13580727

SEQ ID NO: 109396 - protein, 97 aa, Arabidopsis thaliana; identical to SEQ ID NO: 79522
  peptide (1)..(97): Ceres Seq. ID no. 13580728

SEQ ID NO: 109397 - DNA, 3155 bp, Arabidopsis thaliana; identical to SEQ ID NO: 98158
  misc_feature (1)..(3155): Ceres Seq. ID no. 13580733
  misc_feature (1)..(3155): Ortholog of  Ceres SEQ ID NO 13599900 as cited in SEQ ID NO 531
  misc_feature (1)..(3155): Ortholog of  Ceres SEQ ID NO 12625335 as cited in SEQ ID NO 63326
  misc_feature (1)..(3155): Ortholog of  Ceres SEQ ID NO 13659971 as cited in SEQ ID NO 67565
  misc_feature (1)..(3155): Ortholog of  Ceres SEQ ID NO 13500385 as cited in SEQ ID NO 67583
  misc_feature (1434)..(1434): n is a, c, t, g, unknown, or other
  misc_feature (1436)..(1436): n is a, c, t, g, unknown, or other
  misc_feature (1438)..(1438): n is a, c, t, g, unknown, or other

SEQ ID NO: 109398 - protein, 440 aa, Arabidopsis thaliana; identical to SEQ ID NO: 98159
  peptide (1)..(440): Ceres Seq. ID no. 13580734

SEQ ID NO: 109399 - protein, 436 aa, Arabidopsis thaliana; identical to SEQ ID NO: 98160
  peptide (1)..(436): Ceres Seq. ID no. 13580735

SEQ ID NO: 109400 - protein, 354 aa, Arabidopsis thaliana; identical to SEQ ID NO: 98161
  peptide (1)..(354): Ceres Seq. ID no. 13580736

SEQ ID NO: 109401 - DNA, 3309 bp, Arabidopsis thaliana; identical to SEQ ID NO: 98162
  misc_feature (1)..(3309): Ceres Seq. ID no. 13580737
  misc_feature (1)..(3309): Ortholog of  Ceres SEQ ID NO 15170524 as cited in SEQ ID NO 55695

SEQ ID NO: 109402 - protein, 379 aa, Arabidopsis thaliana; identical to SEQ ID NO: 98163
  peptide (1)..(379): Ceres Seq. ID no. 13580738

SEQ ID NO: 109403 - protein, 377 aa, Arabidopsis thaliana; identical to SEQ ID NO: 98164
  peptide (1)..(377): Ceres Seq. ID no. 13580739

SEQ ID NO: 109404 - protein, 360 aa, Arabidopsis thaliana; identical to SEQ ID NO: 98165
  peptide (1)..(360): Ceres Seq. ID no. 13580740

SEQ ID NO: 109405 - DNA, 1492 bp, Arabidopsis thaliana; identical to SEQ ID NO: 98166
  misc_feature (1)..(1492): Ceres Seq. ID no. 13580741
  misc_feature (1)..(1492): Ortholog of  Ceres SEQ ID NO 14310740 as cited in SEQ ID NO 53755
  misc_feature (1)..(1492): Ortholog of  Ceres SEQ ID NO 13596202 as cited in SEQ ID NO 68492

SEQ ID NO: 109406 - protein, 439 aa, Arabidopsis thaliana; identical to SEQ ID NO: 98167
  peptide (1)..(439): Ceres Seq. ID no. 13580742

SEQ ID NO: 109407 - protein, 402 aa, Arabidopsis thaliana; identical to SEQ ID NO: 78261
  peptide (1)..(402): Ceres Seq. ID no. 13580743

SEQ ID NO: 109408 - protein, 325 aa, Arabidopsis thaliana; identical to SEQ ID NO: 78262
  peptide (1)..(325): Ceres Seq. ID no. 13580744

SEQ ID NO: 109409 - DNA, 1008 bp, Arabidopsis thaliana; identical to SEQ ID NO: 98170
  misc_feature (1)..(1008): Ceres Seq. ID no. 13580749
  misc_feature (1)..(1008): Ortholog of  Ceres SEQ ID NO 15172070 as cited in SEQ ID NO 59663

SEQ ID NO: 109410 - protein, 258 aa, Arabidopsis thaliana; identical to SEQ ID NO: 98171
  peptide (1)..(258): Ceres Seq. ID no. 13580750

SEQ ID NO: 109411 - protein, 176 aa, Arabidopsis thaliana; identical to SEQ ID NO: 27014
  peptide (1)..(176): Ceres Seq. ID no. 13580751

SEQ ID NO: 109412 - protein, 139 aa, Arabidopsis thaliana; identical to SEQ ID NO: 98173
  peptide (1)..(139): Ceres Seq. ID no. 13580752

SEQ ID NO: 109413 - DNA, 1814 bp, Arabidopsis thaliana; identical to SEQ ID NO: 98174
  misc_feature (1)..(1814): Ceres Seq. ID no. 13580753
  misc_feature (1)..(1814): Ortholog of  Ceres SEQ ID NO 14308698 as cited in SEQ ID NO 58663

SEQ ID NO: 109414 - protein, 478 aa, Arabidopsis thaliana; identical to SEQ ID NO: 88103
  peptide (1)..(478): Ceres Seq. ID no. 13580754

SEQ ID NO: 109415 - protein, 446 aa, Arabidopsis thaliana; identical to SEQ ID NO: 88104
  peptide (1)..(446): Ceres Seq. ID no. 13580755

SEQ ID NO: 109416 - protein, 439 aa, Arabidopsis thaliana; identical to SEQ ID NO: 88105
  peptide (1)..(439): Ceres Seq. ID no. 13580756

SEQ ID NO: 109417 - DNA, 1438 bp, Arabidopsis thaliana; identical to SEQ ID NO: 98178
  misc_feature (1)..(1438): Ceres Seq. ID no. 13580769
  misc_feature (1)..(1438): Ortholog of  Ceres SEQ ID NO 13598387 as cited in SEQ ID NO 62757
  misc_feature (1)..(1438): Ortholog of  Ceres SEQ ID NO 13662984 as cited in SEQ ID NO 64419

SEQ ID NO: 109418 - protein, 306 aa, Arabidopsis thaliana; identical to SEQ ID NO: 37477
  peptide (1)..(306): Ceres Seq. ID no. 13580770

SEQ ID NO: 109419 - protein, 259 aa, Arabidopsis thaliana; identical to SEQ ID NO: 37478
  peptide (1)..(259): Ceres Seq. ID no. 13580771

SEQ ID NO: 109420 - protein, 153 aa, Arabidopsis thaliana; identical to SEQ ID NO: 37479
  peptide (1)..(153): Ceres Seq. ID no. 13580772

SEQ ID NO: 109421 - DNA, 786 bp, Arabidopsis thaliana; identical to SEQ ID NO: 98182
  misc_feature (1)..(786): Ceres Seq. ID no. 13580773
  misc_feature (1)..(786): Ortholog of  Ceres SEQ ID NO 13598227 as cited in SEQ ID NO 61591
  misc_feature (1)..(786): Ortholog of  Ceres SEQ ID NO 12584790 as cited in SEQ ID NO 62648
  misc_feature (1)..(786): Ortholog of  Ceres SEQ ID NO 13545965 as cited in SEQ ID NO 67378

SEQ ID NO: 109422 - protein, 148 aa, Arabidopsis thaliana; identical to SEQ ID NO: 98183
  peptide (1)..(148): Ceres Seq. ID no. 13580774

SEQ ID NO: 109423 - protein, 119 aa, Arabidopsis thaliana; identical to SEQ ID NO: 98184
  peptide (1)..(119): Ceres Seq. ID no. 13580775

SEQ ID NO: 109424 - protein, 111 aa, Arabidopsis thaliana; identical to SEQ ID NO: 98185
  peptide (1)..(111): Ceres Seq. ID no. 13580776

SEQ ID NO: 109425 - DNA, 639 bp, Arabidopsis thaliana; identical to SEQ ID NO: 98186
  misc_feature (1)..(639): Ceres Seq. ID no. 13580783
  misc_feature (1)..(639): Ortholog of  Ceres SEQ ID NO 15172828 as cited in SEQ ID NO 60174

SEQ ID NO: 109426 - protein, 118 aa, Arabidopsis thaliana; identical to SEQ ID NO: 29115
  peptide (1)..(118): Ceres Seq. ID no. 13580784

SEQ ID NO: 109427 - DNA, 890 bp, Arabidopsis thaliana; identical to SEQ ID NO: 98188
  misc_feature (1)..(890): Ceres Seq. ID no. 13580791
  misc_feature (1)..(890): Ortholog of  Ceres SEQ ID NO 12780822 as cited in SEQ ID NO 67471

SEQ ID NO: 109428 - protein, 246 aa, Arabidopsis thaliana; identical to SEQ ID NO: 76739
  peptide (1)..(246): Ceres Seq. ID no. 13580792

SEQ ID NO: 109429 - protein, 231 aa, Arabidopsis thaliana; identical to SEQ ID NO: 34728
  peptide (1)..(231): Ceres Seq. ID no. 13580793

SEQ ID NO: 109430 - protein, 155 aa, Arabidopsis thaliana; identical to SEQ ID NO: 34729
  peptide (1)..(155): Ceres Seq. ID no. 13580794

SEQ ID NO: 109431 - DNA, 858 bp, Arabidopsis thaliana; identical to SEQ ID NO: 98192
  misc_feature (1)..(858): Ceres Seq. ID no. 13580795
  misc_feature (1)..(858): Ortholog of  Ceres SEQ ID NO 13504237 as cited in SEQ ID NO 100
  misc_feature (1)..(858): Ortholog of  Ceres SEQ ID NO 15176643 as cited in SEQ ID NO 57825
  misc_feature (1)..(858): Ortholog of  Ceres SEQ ID NO 12598265 as cited in SEQ ID NO 65873
  misc_feature (1)..(858): Ortholog of  Ceres SEQ ID NO 15180736 as cited in SEQ ID NO 0

SEQ ID NO: 109432 - protein, 240 aa, Arabidopsis thaliana; identical to SEQ ID NO: 98193
  peptide (1)..(240): Ceres Seq. ID no. 13580796

SEQ ID NO: 109433 - protein, 207 aa, Arabidopsis thaliana [sequence omitted]

SEQ ID NO: 109434 - protein, 128 aa, Arabidopsis thaliana; identical to SEQ ID NO: 43944
  peptide (1)..(128): Ceres Seq. ID no. 13580798

SEQ ID NO: 109435 - DNA, 1605 bp, Arabidopsis thaliana; identical to SEQ ID NO: 98196
  misc_feature (1)..(1605): Ceres Seq. ID no. 13580806
  misc_feature (1)..(1605): Ortholog of  Ceres SEQ ID NO 13597533 as cited in SEQ ID NO 64942

SEQ ID NO: 109436 - protein, 265 aa, Arabidopsis thaliana; identical to SEQ ID NO: 22091
  peptide (1)..(265): Ceres Seq. ID no. 13580807

SEQ ID NO: 109437 - protein, 214 aa, Arabidopsis thaliana; identical to SEQ ID NO: 22092
  peptide (1)..(214): Ceres Seq. ID no. 13580808

SEQ ID NO: 109438 - protein, 186 aa, Arabidopsis thaliana; identical to SEQ ID NO: 22093
  peptide (1)..(186): Ceres Seq. ID no. 13580809

SEQ ID NO: 109439 - DNA, 1756 bp, Arabidopsis thaliana; identical to SEQ ID NO: 98200
  misc_feature (1)..(1756): Ceres Seq. ID no. 13580810
  misc_feature (1)..(1756): Ortholog of  Ceres SEQ ID NO 15177368 as cited in SEQ ID NO 57336

SEQ ID NO: 109440 - protein, 510 aa, Arabidopsis thaliana; identical to SEQ ID NO: 98201
  peptide (1)..(510): Ceres Seq. ID no. 13580811

SEQ ID NO: 109441 - protein, 421 aa, Arabidopsis thaliana; identical to SEQ ID NO: 98202
  peptide (1)..(421): Ceres Seq. ID no. 13580812

SEQ ID NO: 109442 - protein, 362 aa, Arabidopsis thaliana; identical to SEQ ID NO: 98203
  peptide (1)..(362): Ceres Seq. ID no. 13580813

SEQ ID NO: 109443 - DNA, 1175 bp, Arabidopsis thaliana; identical to SEQ ID NO: 98204
  misc_feature (1)..(1175): Ceres Seq. ID no. 13580824
  misc_feature (1)..(1175): Ortholog of  Ceres SEQ ID NO 13594252 as cited in SEQ ID NO 57528
  misc_feature (1)..(1175): Ortholog of  Ceres SEQ ID NO 14305682 as cited in SEQ ID NO 59267
  misc_feature (1)..(1175): Ortholog of  Ceres SEQ ID NO 13594430 as cited in SEQ ID NO 60181
  misc_feature (1)..(1175): Ortholog of  Ceres SEQ ID NO 13597809 as cited in SEQ ID NO 64598
  misc_feature (1)..(1175): Ortholog of  Ceres SEQ ID NO 14313544 as cited in SEQ ID NO 68424
  misc_feature (1)..(1175): Ortholog of  Ceres SEQ ID NO 12617960 as cited in SEQ ID NO 69051
  misc_feature (1)..(1175): Ortholog of  Ceres SEQ ID NO 13589401 as cited in SEQ ID NO 0
  misc_feature (1)..(1175): Ortholog of  Ceres SEQ ID NO 15179361 as cited in SEQ ID NO 0

SEQ ID NO: 109444 - protein, 306 aa, Arabidopsis thaliana; identical to SEQ ID NO: 98205
  peptide (1)..(306): Ceres Seq. ID no. 13580825

SEQ ID NO: 109445 - protein, 275 aa, Arabidopsis thaliana; identical to SEQ ID NO: 24857
  peptide (1)..(275): Ceres Seq. ID no. 13580826

SEQ ID NO: 109446 - protein, 249 aa, Arabidopsis thaliana; identical to SEQ ID NO: 24858
  peptide (1)..(249): Ceres Seq. ID no. 13580827

SEQ ID NO: 109447 - DNA, 1830 bp, Arabidopsis thaliana; identical to SEQ ID NO: 98208
  misc_feature (1)..(1830): Ceres Seq. ID no. 13580828
  misc_feature (1)..(1830): Ortholog of  Ceres SEQ ID NO 13584573 as cited in SEQ ID NO 60711
  misc_feature (1)..(1830): Ortholog of  Ceres SEQ ID NO 15180548 as cited in SEQ ID NO 0

SEQ ID NO: 109448 - protein, 475 aa, Arabidopsis thaliana; identical to SEQ ID NO: 26949
  peptide (1)..(475): Ceres Seq. ID no. 13580829

SEQ ID NO: 109449 - protein, 409 aa, Arabidopsis thaliana; identical to SEQ ID NO: 26950
  peptide (1)..(409): Ceres Seq. ID no. 13580830

SEQ ID NO: 109450 - protein, 397 aa, Arabidopsis thaliana; identical to SEQ ID NO: 26951
  peptide (1)..(397): Ceres Seq. ID no. 13580831

SEQ ID NO: 109451 - DNA, 754 bp, Arabidopsis thaliana; identical to SEQ ID NO: 98212
  misc_feature (1)..(754): Ceres Seq. ID no. 13580838
  misc_feature (1)..(754): Ortholog of  Ceres SEQ ID NO 15176693 as cited in SEQ ID NO 1078
  misc_feature (1)..(754): Ortholog of  Ceres SEQ ID NO 12615074 as cited in SEQ ID NO 62676
  misc_feature (1)..(754): Ortholog of  Ceres SEQ ID NO 13598819 as cited in SEQ ID NO 0
  misc_feature (1)..(754): Ortholog of  Ceres SEQ ID NO 13600371 as cited in SEQ ID NO 0

SEQ ID NO: 109452 - protein, 166 aa, Arabidopsis thaliana; identical to SEQ ID NO: 36054
  peptide (1)..(166): Ceres Seq. ID no. 13580839

SEQ ID NO: 109453 - protein, 131 aa, Arabidopsis thaliana; identical to SEQ ID NO: 30808
  peptide (1)..(131): Ceres Seq. ID no. 13580840

SEQ ID NO: 109454 - protein, 120 aa, Arabidopsis thaliana; identical to SEQ ID NO: 30809
  peptide (1)..(120): Ceres Seq. ID no. 13580841

SEQ ID NO: 109455 - DNA, 1908 bp, Arabidopsis thaliana; identical to SEQ ID NO: 98216
  misc_feature (1)..(1908): Ceres Seq. ID no. 13588938
  misc_feature (1)..(1908): Ortholog of  Ceres SEQ ID NO 13593854 as cited in SEQ ID NO 53403
  misc_feature (1)..(1908): Ortholog of  Ceres SEQ ID NO 12581680 as cited in SEQ ID NO 55019
  misc_feature (1)..(1908): Ortholog of  Ceres SEQ ID NO 15172112 as cited in SEQ ID NO 59632

SEQ ID NO: 109456 - protein, 400 aa, Arabidopsis thaliana; identical to SEQ ID NO: 98217
  peptide (1)..(400): Ceres Seq. ID no. 13588939

SEQ ID NO: 109457 - protein, 395 aa, Arabidopsis thaliana; identical to SEQ ID NO: 98218
  peptide (1)..(395): Ceres Seq. ID no. 13588940

SEQ ID NO: 109458 - protein, 351 aa, Arabidopsis thaliana; identical to SEQ ID NO: 98219
  peptide (1)..(351): Ceres Seq. ID no. 13588941

SEQ ID NO: 109459 - DNA, 1381 bp, Arabidopsis thaliana; identical to SEQ ID NO: 98220
  misc_feature (1)..(1381): Ceres Seq. ID no. 13591537
  misc_feature (1)..(1381): Ortholog of  Ceres SEQ ID NO 13598548 as cited in SEQ ID NO 65227

SEQ ID NO: 109460 - protein, 387 aa, Arabidopsis thaliana; identical to SEQ ID NO: 45982
  peptide (1)..(387): Ceres Seq. ID no. 13591538

SEQ ID NO: 109461 - protein, 356 aa, Arabidopsis thaliana; identical to SEQ ID NO: 45983
  peptide (1)..(356): Ceres Seq. ID no. 13591539

SEQ ID NO: 109462 - protein, 262 aa, Arabidopsis thaliana; identical to SEQ ID NO: 45984
  peptide (1)..(262): Ceres Seq. ID no. 13591540

SEQ ID NO: 109463 - DNA, 1755 bp, Arabidopsis thaliana; identical to SEQ ID NO: 98224
  misc_feature (1)..(1755): Ceres Seq. ID no. 13591919
  misc_feature (1)..(1755): Ortholog of  Ceres SEQ ID NO 14309993 as cited in SEQ ID NO 213
  misc_feature (1)..(1755): Ortholog of  Ceres SEQ ID NO 14307460 as cited in SEQ ID NO 54091
  misc_feature (1)..(1755): Ortholog of  Ceres SEQ ID NO 14304851 as cited in SEQ ID NO 54837

SEQ ID NO: 109464 - protein, 506 aa, Arabidopsis thaliana; identical to SEQ ID NO: 72670
  peptide (1)..(506): Ceres Seq. ID no. 13591920

SEQ ID NO: 109465 - protein, 457 aa, Arabidopsis thaliana; identical to SEQ ID NO: 72671
  peptide (1)..(457): Ceres Seq. ID no. 13591921

SEQ ID NO: 109466 - protein, 455 aa, Arabidopsis thaliana; identical to SEQ ID NO: 72672
  peptide (1)..(455): Ceres Seq. ID no. 13591922

SEQ ID NO: 109467 - DNA, 1556 bp, Arabidopsis thaliana; identical to SEQ ID NO: 98228
  misc_feature (1)..(1556): Ceres Seq. ID no. 13592516
  misc_feature (1)..(1556): Ortholog of  Ceres SEQ ID NO 12636863 as cited in SEQ ID NO 0

SEQ ID NO: 109468 - protein, 388 aa, Arabidopsis thaliana; identical to SEQ ID NO: 98229
  peptide (1)..(388): Ceres Seq. ID no. 13592517

SEQ ID NO: 109469 - protein, 374 aa, Arabidopsis thaliana; identical to SEQ ID NO: 98230
  peptide (1)..(374): Ceres Seq. ID no. 13592518

SEQ ID NO: 109470 - protein, 368 aa, Arabidopsis thaliana; identical to SEQ ID NO: 98231
  peptide (1)..(368): Ceres Seq. ID no. 13592519

SEQ ID NO: 109471 - DNA, 3304 bp, Arabidopsis thaliana; identical to SEQ ID NO: 98232
  misc_feature (1)..(3304): Ceres Seq. ID no. 13592702
  misc_feature (1)..(3304): Ortholog of  Ceres SEQ ID NO 15169623 as cited in SEQ ID NO 67523

SEQ ID NO: 109472 - protein, 540 aa, Arabidopsis thaliana; identical to SEQ ID NO: 98233
  peptide (1)..(540): Ceres Seq. ID no. 13592703

SEQ ID NO: 109473 - protein, 539 aa, Arabidopsis thaliana; identical to SEQ ID NO: 25563
  peptide (1)..(539): Ceres Seq. ID no. 13592704

SEQ ID NO: 109474 - protein, 435 aa, Arabidopsis thaliana; identical to SEQ ID NO: 25564
  peptide (1)..(435): Ceres Seq. ID no. 13592705

SEQ ID NO: 109475 - DNA, 952 bp, Arabidopsis thaliana; identical to SEQ ID NO: 98236
  misc_feature (1)..(952): Ceres Seq. ID no. 13592727
  misc_feature (1)..(952): Ortholog of  Ceres SEQ ID NO 14303553 as cited in SEQ ID NO 65318

SEQ ID NO: 109476 - protein, 268 aa, Arabidopsis thaliana; identical to SEQ ID NO: 98237
  peptide (1)..(268): Ceres Seq. ID no. 13592728

SEQ ID NO: 109477 - protein, 218 aa, Arabidopsis thaliana; identical to SEQ ID NO: 98238
  peptide (1)..(218): Ceres Seq. ID no. 13592729

SEQ ID NO: 109478 - protein, 164 aa, Arabidopsis thaliana; identical to SEQ ID NO: 98239
  peptide (1)..(164): Ceres Seq. ID no. 13592730

SEQ ID NO: 109479 - DNA, 848 bp, Arabidopsis thaliana; identical to SEQ ID NO: 98240
  misc_feature (1)..(848): Ceres Seq. ID no. 13592748
  misc_feature (1)..(848): Ortholog of  Ceres SEQ ID NO 13638609 as cited in SEQ ID NO 52110

SEQ ID NO: 109480 - protein, 235 aa, Arabidopsis thaliana; identical to SEQ ID NO: 98241
  peptide (1)..(235): Ceres Seq. ID no. 13592749

SEQ ID NO: 109481 - protein, 225 aa, Arabidopsis thaliana; identical to SEQ ID NO: 98242
  peptide (1)..(225): Ceres Seq. ID no. 13592750

SEQ ID NO: 109482 - protein, 213 aa, Arabidopsis thaliana; identical to SEQ ID NO: 98243
  peptide (1)..(213): Ceres Seq. ID no. 13592751

SEQ ID NO: 109483 - DNA, 1588 bp, Arabidopsis thaliana; identical to SEQ ID NO: 98244
  misc_feature (1)..(1588): Ceres Seq. ID no. 13592796
  misc_feature (1)..(1588): Ortholog of  Ceres SEQ ID NO 15176057 as cited in SEQ ID NO 56363
  misc_feature (1)..(1588): Ortholog of  Ceres SEQ ID NO 14316269 as cited in SEQ ID NO 60082

SEQ ID NO: 109484 - protein, 384 aa, Arabidopsis thaliana; identical to SEQ ID NO: 43536
  peptide (1)..(384): Ceres Seq. ID no. 15221154

SEQ ID NO: 109485 - protein, 382 aa, Arabidopsis thaliana; identical to SEQ ID NO: 43537
  peptide (1)..(382): Ceres Seq. ID no. 15221155

SEQ ID NO: 109486 - protein, 288 aa, Arabidopsis thaliana; identical to SEQ ID NO: 43538
  peptide (1)..(288): Ceres Seq. ID no. 15221156

SEQ ID NO: 109487 - DNA, 1297 bp, Arabidopsis thaliana; identical to SEQ ID NO: 98248
  misc_feature (1)..(1297): Ceres Seq. ID no. 13592809
  misc_feature (1)..(1297): Ortholog of  Ceres SEQ ID NO 13595414 as cited in SEQ ID NO 56539
  misc_feature (1)..(1297): Ortholog of  Ceres SEQ ID NO 14314396 as cited in SEQ ID NO 60048

SEQ ID NO: 109488 - protein, 370 aa, Arabidopsis thaliana; identical to SEQ ID NO: 35084
  peptide (1)..(370): Ceres Seq. ID no. 13592810

SEQ ID NO: 109489 - protein, 336 aa, Arabidopsis thaliana; identical to SEQ ID NO: 35085
  peptide (1)..(336): Ceres Seq. ID no. 13592811

SEQ ID NO: 109490 - protein, 259 aa, Arabidopsis thaliana; identical to SEQ ID NO: 35086
  peptide (1)..(259): Ceres Seq. ID no. 13592812

SEQ ID NO: 109491 - DNA, 1004 bp, Arabidopsis thaliana; identical to SEQ ID NO: 98252
  misc_feature (1)..(1004): Ceres Seq. ID no. 13592861
  misc_feature (1)..(1004): Ortholog of  Ceres SEQ ID NO 12582036 as cited in SEQ ID NO 50981
  misc_feature (1)..(1004): Ortholog of  Ceres SEQ ID NO 15173523 as cited in SEQ ID NO 61797

SEQ ID NO: 109492 - protein, 255 aa, Arabidopsis thaliana; identical to SEQ ID NO: 27717
  peptide (1)..(255): Ceres Seq. ID no. 13592862

SEQ ID NO: 109493 - protein, 246 aa, Arabidopsis thaliana; identical to SEQ ID NO: 27718
  peptide (1)..(246): Ceres Seq. ID no. 13592863

SEQ ID NO: 109494 - protein, 233 aa, Arabidopsis thaliana; identical to SEQ ID NO: 27719
  peptide (1)..(233): Ceres Seq. ID no. 13592864

SEQ ID NO: 109495 - DNA, 1137 bp, Arabidopsis thaliana; identical to SEQ ID NO: 98256
  misc_feature (1)..(1137): Ceres Seq. ID no. 13592902
  misc_feature (1)..(1137): Ortholog of  Ceres SEQ ID NO 12616162 as cited in SEQ ID NO 63260

SEQ ID NO: 109496 - protein, 311 aa, Arabidopsis thaliana; identical to SEQ ID NO: 98257
  peptide (1)..(311): Ceres Seq. ID no. 13592903

SEQ ID NO: 109497 - protein, 226 aa, Arabidopsis thaliana; identical to SEQ ID NO: 37193
  peptide (1)..(226): Ceres Seq. ID no. 13592904

SEQ ID NO: 109498 - protein, 221 aa, Arabidopsis thaliana; identical to SEQ ID NO: 37194
  peptide (1)..(221): Ceres Seq. ID no. 13592905

SEQ ID NO: 109499 - DNA, 861 bp, Arabidopsis thaliana; identical to SEQ ID NO: 98260
  misc_feature (1)..(861): Ceres Seq. ID no. 13592969
  misc_feature (1)..(861): Ortholog of  Ceres SEQ ID NO 14313170 as cited in SEQ ID NO 20674

SEQ ID NO: 109500 - protein, 241 aa, Arabidopsis thaliana; identical to SEQ ID NO: 98261
  peptide (1)..(241): Ceres Seq. ID no. 13592970

SEQ ID NO: 109501 - protein, 238 aa, Arabidopsis thaliana; identical to SEQ ID NO: 98262
  peptide (1)..(238): Ceres Seq. ID no. 13592971

SEQ ID NO: 109502 - DNA, 1146 bp, Arabidopsis thaliana; identical to SEQ ID NO: 98263
  misc_feature (1)..(1146): Ceres Seq. ID no. 13592985
  misc_feature (1)..(1146): Ortholog of  Ceres SEQ ID NO 13594809 as cited in SEQ ID NO 51847
  misc_feature (1)..(1146): Ortholog of  Ceres SEQ ID NO 12563124 as cited in SEQ ID NO 57104
  misc_feature (1)..(1146): Ortholog of  Ceres SEQ ID NO 15226273 as cited in SEQ ID NO 64934
  misc_feature (1)..(1146): Ortholog of  Ceres SEQ ID NO 12617639 as cited in SEQ ID NO 65219
  misc_feature (1)..(1146): Ortholog of  Ceres SEQ ID NO 15173998 as cited in SEQ ID NO 0
  misc_feature (1)..(1146): Ortholog of  Ceres SEQ ID NO 15178333 as cited in SEQ ID NO 0

SEQ ID NO: 109503 - protein, 309 aa, Arabidopsis thaliana; identical to SEQ ID NO: 98264
  peptide (1)..(309): Ceres Seq. ID no. 13592986

SEQ ID NO: 109504 - protein, 273 aa, Arabidopsis thaliana; identical to SEQ ID NO: 98265
  peptide (1)..(273): Ceres Seq. ID no. 13592987

SEQ ID NO: 109505 - protein, 263 aa, Arabidopsis thaliana; identical to SEQ ID NO: 98266
  peptide (1)..(263): Ceres Seq. ID no. 13592988

SEQ ID NO: 109506 - DNA, 1008 bp, Arabidopsis thaliana; identical to SEQ ID NO: 98267
  misc_feature (1)..(1008): Ceres Seq. ID no. 13592999
  misc_feature (1)..(1008): Ortholog of  Ceres SEQ ID NO 14301994 as cited in SEQ ID NO 56653
  misc_feature (1)..(1008): Ortholog of  Ceres SEQ ID NO 13595658 as cited in SEQ ID NO 59888
  misc_feature (1)..(1008): Ortholog of  Ceres SEQ ID NO 13661330 as cited in SEQ ID NO 61614
  misc_feature (1)..(1008): Ortholog of  Ceres SEQ ID NO 13596025 as cited in SEQ ID NO 62024
  misc_feature (1)..(1008): Ortholog of  Ceres SEQ ID NO 13662324 as cited in SEQ ID NO 62162
  misc_feature (1)..(1008): Ortholog of  Ceres SEQ ID NO 12625713 as cited in SEQ ID NO 64160
  misc_feature (1)..(1008): Ortholog of  Ceres SEQ ID NO 14301782 as cited in SEQ ID NO 66788
  misc_feature (1)..(1008): Ortholog of  Ceres SEQ ID NO 14302860 as cited in SEQ ID NO 67667
  misc_feature (1)..(1008): Ortholog of  Ceres SEQ ID NO 15174373 as cited in SEQ ID NO 0

SEQ ID NO: 109507 - protein, 256 aa, Arabidopsis thaliana; identical to SEQ ID NO: 98268
  peptide (1)..(256): Ceres Seq. ID no. 13593000

SEQ ID NO: 109508 - protein, 243 aa, Arabidopsis thaliana; identical to SEQ ID NO: 98269
  peptide (1)..(243): Ceres Seq. ID no. 13593001

SEQ ID NO: 109509 - DNA, 1590 bp, Arabidopsis thaliana; identical to SEQ ID NO: 98270
  misc_feature (1)..(1590): Ceres Seq. ID no. 13593006
  misc_feature (1)..(1590): Ortholog of  Ceres SEQ ID NO 13646221 as cited in SEQ ID NO 20310

SEQ ID NO: 109510 - protein, 529 aa, Arabidopsis thaliana; identical to SEQ ID NO: 98271
  peptide (1)..(529): Ceres Seq. ID no. 13593007

SEQ ID NO: 109511 - protein, 402 aa, Arabidopsis thaliana; identical to SEQ ID NO: 98272
  peptide (1)..(402): Ceres Seq. ID no. 13593008

SEQ ID NO: 109512 - protein, 395 aa, Arabidopsis thaliana; identical to SEQ ID NO: 98273
  peptide (1)..(395): Ceres Seq. ID no. 13593009

SEQ ID NO: 109513 - DNA, 1631 bp, Arabidopsis thaliana; identical to SEQ ID NO: 98274
  misc_feature (1)..(1631): Ceres Seq. ID no. 13593017
  misc_feature (1)..(1631): Ortholog of  Ceres SEQ ID NO 13593831 as cited in SEQ ID NO 53828

SEQ ID NO: 109514 - protein, 287 aa, Arabidopsis thaliana; identical to SEQ ID NO: 29005
  peptide (1)..(287): Ceres Seq. ID no. 13593018

SEQ ID NO: 109515 - protein, 214 aa, Arabidopsis thaliana; identical to SEQ ID NO: 29006
  peptide (1)..(214): Ceres Seq. ID no. 13593019

SEQ ID NO: 109516 - protein, 206 aa, Arabidopsis thaliana; identical to SEQ ID NO: 29007
  peptide (1)..(206): Ceres Seq. ID no. 13593020

SEQ ID NO: 109517 - DNA, 1468 bp, Arabidopsis thaliana; identical to SEQ ID NO: 98278
  misc_feature (1)..(1468): Ceres Seq. ID no. 13593033
  misc_feature (1)..(1468): Ortholog of  Ceres SEQ ID NO 14303596 as cited in SEQ ID NO 65356

SEQ ID NO: 109518 - protein, 423 aa, Arabidopsis thaliana; identical to SEQ ID NO: 98279
  peptide (1)..(423): Ceres Seq. ID no. 13593034

SEQ ID NO: 109519 - protein, 368 aa, Arabidopsis thaliana; identical to SEQ ID NO: 98280
  peptide (1)..(368): Ceres Seq. ID no. 13593035

SEQ ID NO: 109520 - protein, 350 aa, Arabidopsis thaliana; identical to SEQ ID NO: 98281
  peptide (1)..(350): Ceres Seq. ID no. 13593036

SEQ ID NO: 109521 - DNA, 1272 bp, Arabidopsis thaliana; identical to SEQ ID NO: 98282
  misc_feature (1)..(1272): Ceres Seq. ID no. 13593041
  misc_feature (1)..(1272): Ortholog of  Ceres SEQ ID NO 15171268 as cited in SEQ ID NO 51297
  misc_feature (1)..(1272): Ortholog of  Ceres SEQ ID NO 15170521 as cited in SEQ ID NO 55668
  misc_feature (1)..(1272): Ortholog of  Ceres SEQ ID NO 13598249 as cited in SEQ ID NO 62509
  misc_feature (1)..(1272): Ortholog of  Ceres SEQ ID NO 13598595 as cited in SEQ ID NO 64671
  misc_feature (1)..(1272): Ortholog of  Ceres SEQ ID NO 13654241 as cited in SEQ ID NO 68348

SEQ ID NO: 109522 - protein, 287 aa, Arabidopsis thaliana; identical to SEQ ID NO: 76582
  peptide (1)..(287): Ceres Seq. ID no. 13593042

SEQ ID NO: 109523 - DNA, 1779 bp, Arabidopsis thaliana; identical to SEQ ID NO: 98284
  misc_feature (1)..(1779): Ceres Seq. ID no. 13593043
  misc_feature (1)..(1779): Ortholog of  Ceres SEQ ID NO 13646415 as cited in SEQ ID NO 20579

SEQ ID NO: 109524 - protein, 592 aa, Arabidopsis thaliana; identical to SEQ ID NO: 98285
  peptide (1)..(592): Ceres Seq. ID no. 13593044

SEQ ID NO: 109525 - protein, 464 aa, Arabidopsis thaliana; identical to SEQ ID NO: 98286
  peptide (1)..(464): Ceres Seq. ID no. 13593045

SEQ ID NO: 109526 - protein, 366 aa, Arabidopsis thaliana; identical to SEQ ID NO: 98287
  peptide (1)..(366): Ceres Seq. ID no. 13593046

SEQ ID NO: 109527 - DNA, 1627 bp, Arabidopsis thaliana; identical to SEQ ID NO: 98288
  misc_feature (1)..(1627): Ceres Seq. ID no. 13593066
  misc_feature (1)..(1627): Ortholog of  Ceres SEQ ID NO 12609146 as cited in SEQ ID NO 52118
  misc_feature (1)..(1627): Ortholog of  Ceres SEQ ID NO 13638136 as cited in SEQ ID NO 58644
  misc_feature (1)..(1627): Ortholog of  Ceres SEQ ID NO 13596868 as cited in SEQ ID NO 62806
  misc_feature (1)..(1627): Ortholog of  Ceres SEQ ID NO 14302836 as cited in SEQ ID NO 65013

SEQ ID NO: 109528 - protein, 413 aa, Arabidopsis thaliana; identical to SEQ ID NO: 98289
  peptide (1)..(413): Ceres Seq. ID no. 13593067

SEQ ID NO: 109529 - protein, 403 aa, Arabidopsis thaliana; identical to SEQ ID NO: 98290
  peptide (1)..(403): Ceres Seq. ID no. 13593068

SEQ ID NO: 109530 - protein, 402 aa, Arabidopsis thaliana; identical to SEQ ID NO: 98291
  peptide (1)..(402): Ceres Seq. ID no. 13593069

SEQ ID NO: 109531 - DNA, 1737 bp, Arabidopsis thaliana; identical to SEQ ID NO: 98292
  misc_feature (1)..(1737): Ceres Seq. ID no. 13593086
  misc_feature (1)..(1737): Ortholog of  Ceres SEQ ID NO 13655463 as cited in SEQ ID NO 69035
  misc_feature (1)..(1737): Ortholog of  Ceres SEQ ID NO 15180063 as cited in SEQ ID NO 0

SEQ ID NO: 109532 - protein, 523 aa, Arabidopsis thaliana; identical to SEQ ID NO: 45629
  peptide (1)..(523): Ceres Seq. ID no. 13593087

SEQ ID NO: 109533 - protein, 492 aa, Arabidopsis thaliana; identical to SEQ ID NO: 45630
  peptide (1)..(492): Ceres Seq. ID no. 13593088

SEQ ID NO: 109534 - protein, 418 aa, Arabidopsis thaliana; identical to SEQ ID NO: 45631
  peptide (1)..(418): Ceres Seq. ID no. 13593089

SEQ ID NO: 109535 - DNA, 972 bp, Arabidopsis thaliana; identical to SEQ ID NO: 98296
  misc_feature (1)..(972): Ceres Seq. ID no. 13593100
  misc_feature (1)..(972): Ortholog of  Ceres SEQ ID NO 13654431 as cited in SEQ ID NO 67761

SEQ ID NO: 109536 - protein, 323 aa, Arabidopsis thaliana; identical to SEQ ID NO: 98297
  peptide (1)..(323): Ceres Seq. ID no. 13593101

SEQ ID NO: 109537 - protein, 304 aa, Arabidopsis thaliana; identical to SEQ ID NO: 98298
  peptide (1)..(304): Ceres Seq. ID no. 13593102

SEQ ID NO: 109538 - protein, 289 aa, Arabidopsis thaliana; identical to SEQ ID NO: 98299
  peptide (1)..(289): Ceres Seq. ID no. 13593103

SEQ ID NO: 109539 - DNA, 1450 bp, Arabidopsis thaliana; identical to SEQ ID NO: 98300
  misc_feature (1)..(1450): Ceres Seq. ID no. 13593112
  misc_feature (1)..(1450): Ortholog of  Ceres SEQ ID NO 12608060 as cited in SEQ ID NO 59263

SEQ ID NO: 109540 - protein, 252 aa, Arabidopsis thaliana; identical to SEQ ID NO: 98301
  peptide (1)..(252): Ceres Seq. ID no. 13593113

SEQ ID NO: 109541 - protein, 245 aa, Arabidopsis thaliana; identical to SEQ ID NO: 98302
  peptide (1)..(245): Ceres Seq. ID no. 13593114

SEQ ID NO: 109542 - protein, 243 aa, Arabidopsis thaliana; identical to SEQ ID NO: 98303
  peptide (1)..(243): Ceres Seq. ID no. 13593115

SEQ ID NO: 109543 - DNA, 1199 bp, Arabidopsis thaliana; identical to SEQ ID NO: 98304
  misc_feature (1)..(1199): Ceres Seq. ID no. 13593116
  misc_feature (1)..(1199): Ortholog of  Ceres SEQ ID NO 14311683 as cited in SEQ ID NO 51263
  misc_feature (1)..(1199): Ortholog of  Ceres SEQ ID NO 15177862 as cited in SEQ ID NO 56033
  misc_feature (1)..(1199): Ortholog of  Ceres SEQ ID NO 13661430 as cited in SEQ ID NO 61258
  misc_feature (1)..(1199): Ortholog of  Ceres SEQ ID NO 13590940 as cited in SEQ ID NO 68653
  misc_feature (1)..(1199): Ortholog of  Ceres SEQ ID NO 14301982 as cited in SEQ ID NO 0
  misc_feature (1)..(1199): Ortholog of  Ceres SEQ ID NO 15179001 as cited in SEQ ID NO 0
  misc_feature (1)..(1199): Ortholog of  Ceres SEQ ID NO 15180040 as cited in SEQ ID NO 0

SEQ ID NO: 109544 - protein, 348 aa, Arabidopsis thaliana; identical to SEQ ID NO: 98305
  peptide (1)..(348): Ceres Seq. ID no. 13593117

SEQ ID NO: 109545 - protein, 329 aa, Arabidopsis thaliana; identical to SEQ ID NO: 98306
  peptide (1)..(329): Ceres Seq. ID no. 13593118

SEQ ID NO: 109546 - protein, 315 aa, Arabidopsis thaliana; identical to SEQ ID NO: 98307
  peptide (1)..(315): Ceres Seq. ID no. 13593119

SEQ ID NO: 109547 - DNA, 3181 bp, Arabidopsis thaliana; identical to SEQ ID NO: 98308
  misc_feature (1)..(3181): Ceres Seq. ID no. 13593125
  misc_feature (1)..(3181): Ortholog of  Ceres SEQ ID NO 13593889 as cited in SEQ ID NO 53305

SEQ ID NO: 109548 - protein, 809 aa, Arabidopsis thaliana; identical to SEQ ID NO: 76093
  peptide (1)..(809): Ceres Seq. ID no. 13593126

SEQ ID NO: 109549 - protein, 573 aa, Arabidopsis thaliana; identical to SEQ ID NO: 76094
  peptide (1)..(573): Ceres Seq. ID no. 13593127

SEQ ID NO: 109550 - protein, 568 aa, Arabidopsis thaliana; identical to SEQ ID NO: 76095
  peptide (1)..(568): Ceres Seq. ID no. 13593128

SEQ ID NO: 109551 - DNA, 1540 bp, Arabidopsis thaliana; identical to SEQ ID NO: 98312
  misc_feature (1)..(1540): Ceres Seq. ID no. 13593139
  misc_feature (1)..(1540): Ortholog of  Ceres SEQ ID NO 15170209 as cited in SEQ ID NO 58562
  misc_feature (1)..(1540): Ortholog of  Ceres SEQ ID NO 12616332 as cited in SEQ ID NO 63449
  misc_feature (1)..(1540): Ortholog of  Ceres SEQ ID NO 13597498 as cited in SEQ ID NO 64648

SEQ ID NO: 109552 - protein, 364 aa, Arabidopsis thaliana; identical to SEQ ID NO: 98313
  peptide (1)..(364): Ceres Seq. ID no. 13593140

SEQ ID NO: 109553 - protein, 345 aa, Arabidopsis thaliana; identical to SEQ ID NO: 98314
  peptide (1)..(345): Ceres Seq. ID no. 13593141

SEQ ID NO: 109554 - protein, 284 aa, Arabidopsis thaliana; identical to SEQ ID NO: 98315
  peptide (1)..(284): Ceres Seq. ID no. 13593142

SEQ ID NO: 109555 - DNA, 1805 bp, Arabidopsis thaliana; identical to SEQ ID NO: 98316
  misc_feature (1)..(1805): Ceres Seq. ID no. 13593143
  misc_feature (1)..(1805): Ortholog of  Ceres SEQ ID NO 14316344 as cited in SEQ ID NO 60120

SEQ ID NO: 109556 - protein, 493 aa, Arabidopsis thaliana; identical to SEQ ID NO: 98317
  peptide (1)..(493): Ceres Seq. ID no. 13593144

SEQ ID NO: 109557 - protein, 352 aa, Arabidopsis thaliana; identical to SEQ ID NO: 40623
  peptide (1)..(352): Ceres Seq. ID no. 13593145

SEQ ID NO: 109558 - protein, 343 aa, Arabidopsis thaliana; identical to SEQ ID NO: 40624
  peptide (1)..(343): Ceres Seq. ID no. 13593146

SEQ ID NO: 109559 - DNA, 2445 bp, Arabidopsis thaliana; identical to SEQ ID NO: 98320
  misc_feature (1)..(2445): Ceres Seq. ID no. 13593147
  misc_feature (1)..(2445): Ortholog of  Ceres SEQ ID NO 14315774 as cited in SEQ ID NO 20630

SEQ ID NO: 109560 - protein, 684 aa, Arabidopsis thaliana; identical to SEQ ID NO: 98321
  peptide (1)..(684): Ceres Seq. ID no. 13593148

SEQ ID NO: 109561 - protein, 678 aa, Arabidopsis thaliana; identical to SEQ ID NO: 98322
  peptide (1)..(678): Ceres Seq. ID no. 13593149

SEQ ID NO: 109562 - protein, 635 aa, Arabidopsis thaliana; identical to SEQ ID NO: 98323
  peptide (1)..(635): Ceres Seq. ID no. 13593150

SEQ ID NO: 109563 - DNA, 1966 bp, Arabidopsis thaliana; identical to SEQ ID NO: 98324
  misc_feature (1)..(1966): Ceres Seq. ID no. 13593151
  misc_feature (1)..(1966): Ortholog of  Ceres SEQ ID NO 13660790 as cited in SEQ ID NO 67460

SEQ ID NO: 109564 - protein, 504 aa, Arabidopsis thaliana; identical to SEQ ID NO: 45556
  peptide (1)..(504): Ceres Seq. ID no. 13593152

SEQ ID NO: 109565 - protein, 443 aa, Arabidopsis thaliana; identical to SEQ ID NO: 45557
  peptide (1)..(443): Ceres Seq. ID no. 13593153

SEQ ID NO: 109566 - protein, 325 aa, Arabidopsis thaliana; identical to SEQ ID NO: 45558
  peptide (1)..(325): Ceres Seq. ID no. 13593154

SEQ ID NO: 109567 - DNA, 915 bp, Arabidopsis thaliana; identical to SEQ ID NO: 98328
  misc_feature (1)..(915): Ceres Seq. ID no. 13593155
  misc_feature (1)..(915): Ortholog of  Ceres SEQ ID NO 14310291 as cited in SEQ ID NO 20682
  misc_feature (1)..(915): Ortholog of  Ceres SEQ ID NO 14311256 as cited in SEQ ID NO 59050
  misc_feature (1)..(915): Ortholog of  Ceres SEQ ID NO 13656079 as cited in SEQ ID NO 64220

SEQ ID NO: 109568 - protein, 304 aa, Arabidopsis thaliana; identical to SEQ ID NO: 98329
  peptide (1)..(304): Ceres Seq. ID no. 13593156

SEQ ID NO: 109569 - protein, 230 aa, Arabidopsis thaliana; identical to SEQ ID NO: 98330
  peptide (1)..(230): Ceres Seq. ID no. 13593157

SEQ ID NO: 109570 - protein, 216 aa, Arabidopsis thaliana; identical to SEQ ID NO: 98331
  peptide (1)..(216): Ceres Seq. ID no. 13593158

SEQ ID NO: 109571 - DNA, 1703 bp, Arabidopsis thaliana; identical to SEQ ID NO: 98332
  misc_feature (1)..(1703): Ceres Seq. ID no. 13593159
  misc_feature (1)..(1703): Ortholog of  Ceres SEQ ID NO 15178096 as cited in SEQ ID NO 52497

SEQ ID NO: 109572 - protein, 403 aa, Arabidopsis thaliana; identical to SEQ ID NO: 98333
  peptide (1)..(403): Ceres Seq. ID no. 13593160

SEQ ID NO: 109573 - protein, 396 aa, Arabidopsis thaliana; identical to SEQ ID NO: 98334
  peptide (1)..(396): Ceres Seq. ID no. 13593161

SEQ ID NO: 109574 - protein, 372 aa, Arabidopsis thaliana; identical to SEQ ID NO: 98335
  peptide (1)..(372): Ceres Seq. ID no. 13593162

SEQ ID NO: 109575 - DNA, 1323 bp, Arabidopsis thaliana; identical to SEQ ID NO: 98336
  misc_feature (1)..(1323): Ceres Seq. ID no. 13593171
  misc_feature (1)..(1323): Ortholog of  Ceres SEQ ID NO 13584612 as cited in SEQ ID NO 65223

SEQ ID NO: 109576 - protein, 440 aa, Arabidopsis thaliana; identical to SEQ ID NO: 98337
  peptide (1)..(440): Ceres Seq. ID no. 13593172

SEQ ID NO: 109577 - protein, 389 aa, Arabidopsis thaliana; identical to SEQ ID NO: 98338
  peptide (1)..(389): Ceres Seq. ID no. 13593173

SEQ ID NO: 109578 - DNA, 1796 bp, Arabidopsis thaliana; identical to SEQ ID NO: 98339
  misc_feature (1)..(1796): Ceres Seq. ID no. 13593202
  misc_feature (1)..(1796): Ortholog of  Ceres SEQ ID NO 13597580 as cited in SEQ ID NO 65322

SEQ ID NO: 109579 - protein, 447 aa, Arabidopsis thaliana; identical to SEQ ID NO: 45740
  peptide (1)..(447): Ceres Seq. ID no. 13593203

SEQ ID NO: 109580 - protein, 354 aa, Arabidopsis thaliana; identical to SEQ ID NO: 45741
  peptide (1)..(354): Ceres Seq. ID no. 13593204

SEQ ID NO: 109581 - protein, 304 aa, Arabidopsis thaliana; identical to SEQ ID NO: 45742
  peptide (1)..(304): Ceres Seq. ID no. 13593205

SEQ ID NO: 109582 - DNA, 2228 bp, Arabidopsis thaliana; identical to SEQ ID NO: 98343
  misc_feature (1)..(2228): Ceres Seq. ID no. 13593238
  misc_feature (1)..(2228): Ortholog of  Ceres SEQ ID NO 13595870 as cited in SEQ ID NO 62101
  misc_feature (1)..(2228): Ortholog of  Ceres SEQ ID NO 13590241 as cited in SEQ ID NO 63878
  misc_feature (1)..(2228): Ortholog of  Ceres SEQ ID NO 13657939 as cited in SEQ ID NO 66349

SEQ ID NO: 109583 - protein, 697 aa, Arabidopsis thaliana; identical to SEQ ID NO: 98344
  peptide (1)..(697): Ceres Seq. ID no. 13593239

SEQ ID NO: 109584 - protein, 685 aa, Arabidopsis thaliana; identical to SEQ ID NO: 45832
  peptide (1)..(685): Ceres Seq. ID no. 13593240

SEQ ID NO: 109585 - protein, 601 aa, Arabidopsis thaliana; identical to SEQ ID NO: 45833
  peptide (1)..(601): Ceres Seq. ID no. 13593241

SEQ ID NO: 109586 - DNA, 1816 bp, Arabidopsis thaliana; identical to SEQ ID NO: 98347
  misc_feature (1)..(1816): Ceres Seq. ID no. 13593246
  misc_feature (1)..(1816): Ortholog of  Ceres SEQ ID NO 13599965 as cited in SEQ ID NO 0
  misc_feature (1)..(1816): Ortholog of  Ceres SEQ ID NO 15180230 as cited in SEQ ID NO 0

SEQ ID NO: 109587 - protein, 582 aa, Arabidopsis thaliana; identical to SEQ ID NO: 98348
  peptide (1)..(582): Ceres Seq. ID no. 13593247

SEQ ID NO: 109588 - protein, 426 aa, Arabidopsis thaliana; identical to SEQ ID NO: 98349
  peptide (1)..(426): Ceres Seq. ID no. 13593248

SEQ ID NO: 109589 - protein, 423 aa, Arabidopsis thaliana; identical to SEQ ID NO: 98350
  peptide (1)..(423): Ceres Seq. ID no. 13593249

SEQ ID NO: 109590 - DNA, 963 bp, Arabidopsis thaliana; identical to SEQ ID NO: 98351
  misc_feature (1)..(963): Ceres Seq. ID no. 13593265
  misc_feature (1)..(963): Ortholog of  Ceres SEQ ID NO 15169976 as cited in SEQ ID NO 60438

SEQ ID NO: 109591 - protein, 320 aa, Arabidopsis thaliana; identical to SEQ ID NO: 98352
  peptide (1)..(320): Ceres Seq. ID no. 13593266

SEQ ID NO: 109592 - protein, 165 aa, Arabidopsis thaliana; identical to SEQ ID NO: 98353
  peptide (1)..(165): Ceres Seq. ID no. 13593267

SEQ ID NO: 109593 - DNA, 1896 bp, Arabidopsis thaliana; identical to SEQ ID NO: 98354
  misc_feature (1)..(1896): Ceres Seq. ID no. 13593272
  misc_feature (1)..(1896): Ortholog of  Ceres SEQ ID NO 13597798 as cited in SEQ ID NO 64311

SEQ ID NO: 109594 - protein, 589 aa, Arabidopsis thaliana; identical to SEQ ID NO: 98355
  peptide (1)..(589): Ceres Seq. ID no. 13593273

SEQ ID NO: 109595 - protein, 586 aa, Arabidopsis thaliana; identical to SEQ ID NO: 98356
  peptide (1)..(586): Ceres Seq. ID no. 13593274

SEQ ID NO: 109596 - protein, 447 aa, Arabidopsis thaliana; identical to SEQ ID NO: 46883
  peptide (1)..(447): Ceres Seq. ID no. 13593275

SEQ ID NO: 109597 - DNA, 1686 bp, Arabidopsis thaliana; identical to SEQ ID NO: 98358
  misc_feature (1)..(1686): Ceres Seq. ID no. 13593302
  misc_feature (1)..(1686): Ortholog of  Ceres SEQ ID NO 13594209 as cited in SEQ ID NO 59089
  misc_feature (1)..(1686): Ortholog of  Ceres SEQ ID NO 13502874 as cited in SEQ ID NO 66298
  misc_feature (1)..(1686): Ortholog of  Ceres SEQ ID NO 12614124 as cited in SEQ ID NO 68392

SEQ ID NO: 109598 - protein, 502 aa, Arabidopsis thaliana; identical to SEQ ID NO: 85413
  peptide (1)..(502): Ceres Seq. ID no. 13593303

SEQ ID NO: 109599 - protein, 428 aa, Arabidopsis thaliana; identical to SEQ ID NO: 85414
  peptide (1)..(428): Ceres Seq. ID no. 13593304

SEQ ID NO: 109600 - protein, 389 aa, Arabidopsis thaliana; identical to SEQ ID NO: 85415
  peptide (1)..(389): Ceres Seq. ID no. 13593305

SEQ ID NO: 109601 - DNA, 2472 bp, Arabidopsis thaliana; identical to SEQ ID NO: 98362
  misc_feature (1)..(2472): Ceres Seq. ID no. 13593380
  misc_feature (1)..(2472): Ortholog of  Ceres SEQ ID NO 13595870 as cited in SEQ ID NO 62101
  misc_feature (1)..(2472): Ortholog of  Ceres SEQ ID NO 13590241 as cited in SEQ ID NO 63878
  misc_feature (1)..(2472): Ortholog of  Ceres SEQ ID NO 13657939 as cited in SEQ ID NO 66349

SEQ ID NO: 109602 - protein, 716 aa, Arabidopsis thaliana; identical to SEQ ID NO: 98363
  peptide (1)..(716): Ceres Seq. ID no. 13593381

SEQ ID NO: 109603 - protein, 531 aa, Arabidopsis thaliana; identical to SEQ ID NO: 45525
  peptide (1)..(531): Ceres Seq. ID no. 13593382

SEQ ID NO: 109604 - protein, 475 aa, Arabidopsis thaliana; identical to SEQ ID NO: 45526
  peptide (1)..(475): Ceres Seq. ID no. 13593383

SEQ ID NO: 109605 - DNA, 1755 bp, Arabidopsis thaliana; identical to SEQ ID NO: 98366
  misc_feature (1)..(1755): Ceres Seq. ID no. 13593392
  misc_feature (1)..(1755): Ortholog of  Ceres SEQ ID NO 13595877 as cited in SEQ ID NO 67702
  misc_feature (1)..(1755): Ortholog of  Ceres SEQ ID NO 13654367 as cited in SEQ ID NO 67993
  misc_feature (1)..(1755): Ortholog of  Ceres SEQ ID NO 13622667 as cited in SEQ ID NO 0

SEQ ID NO: 109606 - protein, 345 aa, Arabidopsis thaliana; identical to SEQ ID NO: 29047
  peptide (1)..(345): Ceres Seq. ID no. 13593393

SEQ ID NO: 109607 - DNA, 1741 bp, Arabidopsis thaliana; identical to SEQ ID NO: 98368
  misc_feature (1)..(1741): Ceres Seq. ID no. 13593406
  misc_feature (1)..(1741): Ortholog of  Ceres SEQ ID NO 15171476 as cited in SEQ ID NO 55569

SEQ ID NO: 109608 - protein, 479 aa, Arabidopsis thaliana; identical to SEQ ID NO: 98369
  peptide (1)..(479): Ceres Seq. ID no. 13593407

SEQ ID NO: 109609 - protein, 472 aa, Arabidopsis thaliana; identical to SEQ ID NO: 98370
  peptide (1)..(472): Ceres Seq. ID no. 13593408

SEQ ID NO: 109610 - protein, 468 aa, Arabidopsis thaliana; identical to SEQ ID NO: 98371
  peptide (1)..(468): Ceres Seq. ID no. 13593409

SEQ ID NO: 109611 - DNA, 1538 bp, Arabidopsis thaliana; identical to SEQ ID NO: 98372
  misc_feature (1)..(1538): Ceres Seq. ID no. 13593435
  misc_feature (1)..(1538): Ortholog of  Ceres SEQ ID NO 14310547 as cited in SEQ ID NO 55132
  misc_feature (1)..(1538): Ortholog of  Ceres SEQ ID NO 13596261 as cited in SEQ ID NO 67817
  misc_feature (1)..(1538): Ortholog of  Ceres SEQ ID NO 13662360 as cited in SEQ ID NO 68830

SEQ ID NO: 109612 - protein, 447 aa, Arabidopsis thaliana; identical to SEQ ID NO: 98373
  peptide (1)..(447): Ceres Seq. ID no. 13593436

SEQ ID NO: 109613 - protein, 435 aa, Arabidopsis thaliana; identical to SEQ ID NO: 48079
  peptide (1)..(435): Ceres Seq. ID no. 13593437

SEQ ID NO: 109614 - protein, 394 aa, Arabidopsis thaliana; identical to SEQ ID NO: 48080
  peptide (1)..(394): Ceres Seq. ID no. 13593438

SEQ ID NO: 109615 - DNA, 1682 bp, Arabidopsis thaliana; identical to SEQ ID NO: 98376
  misc_feature (1)..(1682): Ceres Seq. ID no. 13593475
  misc_feature (1)..(1682): Ortholog of  Ceres SEQ ID NO 14313491 as cited in SEQ ID NO 0

SEQ ID NO: 109616 - protein, 395 aa, Arabidopsis thaliana; identical to SEQ ID NO: 49722
  peptide (1)..(395): Ceres Seq. ID no. 13593476

SEQ ID NO: 109617 - DNA, 899 bp, Arabidopsis thaliana; identical to SEQ ID NO: 98378
  misc_feature (1)..(899): Ceres Seq. ID no. 13593488
  misc_feature (1)..(899): Ortholog of  Ceres SEQ ID NO 13639267 as cited in SEQ ID NO 59777
  misc_feature (1)..(899): Ortholog of  Ceres SEQ ID NO 12624280 as cited in SEQ ID NO 61587

SEQ ID NO: 109618 - protein, 180 aa, Arabidopsis thaliana; identical to SEQ ID NO: 50318
  peptide (1)..(180): Ceres Seq. ID no. 13593489

SEQ ID NO: 109619 - protein, 173 aa, Arabidopsis thaliana; identical to SEQ ID NO: 50319
  peptide (1)..(173): Ceres Seq. ID no. 13593490

SEQ ID NO: 109620 - protein, 105 aa, Arabidopsis thaliana; identical to SEQ ID NO: 50320
  peptide (1)..(105): Ceres Seq. ID no. 13593491

SEQ ID NO: 109621 - DNA, 1580 bp, Arabidopsis thaliana; identical to SEQ ID NO: 98382
  misc_feature (1)..(1580): Ceres Seq. ID no. 13593495
  misc_feature (1)..(1580): Ortholog of  Ceres SEQ ID NO 13654451 as cited in SEQ ID NO 67881

SEQ ID NO: 109622 - protein, 392 aa, Arabidopsis thaliana; identical to SEQ ID NO: 50394
  peptide (1)..(392): Ceres Seq. ID no. 13593496

SEQ ID NO: 109623 - protein, 365 aa, Arabidopsis thaliana; identical to SEQ ID NO: 50395
  peptide (1)..(365): Ceres Seq. ID no. 13593497

SEQ ID NO: 109624 - protein, 361 aa, Arabidopsis thaliana; identical to SEQ ID NO: 98385
  peptide (1)..(361): Ceres Seq. ID no. 13593498

SEQ ID NO: 109625 - DNA, 1451 bp, Arabidopsis thaliana; identical to SEQ ID NO: 98386
  misc_feature (1)..(1451): Ceres Seq. ID no. 13593503
  misc_feature (1)..(1451): Ortholog of  Ceres SEQ ID NO 14303487 as cited in SEQ ID NO 54521
  misc_feature (1)..(1451): Ortholog of  Ceres SEQ ID NO 14316302 as cited in SEQ ID NO 55232
  misc_feature (1)..(1451): Ortholog of  Ceres SEQ ID NO 14308274 as cited in SEQ ID NO 55597
  misc_feature (1)..(1451): Ortholog of  Ceres SEQ ID NO 13659710 as cited in SEQ ID NO 60808

SEQ ID NO: 109626 - protein, 267 aa, Arabidopsis thaliana; identical to SEQ ID NO: 98387
  peptide (1)..(267): Ceres Seq. ID no. 13593504

SEQ ID NO: 109627 - protein, 254 aa, Arabidopsis thaliana; identical to SEQ ID NO: 98388
  peptide (1)..(254): Ceres Seq. ID no. 13593505

SEQ ID NO: 109628 - protein, 180 aa, Arabidopsis thaliana; identical to SEQ ID NO: 98389
  peptide (1)..(180): Ceres Seq. ID no. 13593506

SEQ ID NO: 109629 - DNA, 1242 bp, Arabidopsis thaliana; identical to SEQ ID NO: 98390
  misc_feature (1)..(1242): Ceres Seq. ID no. 13593507
  misc_feature (1)..(1242): Ortholog of  Ceres SEQ ID NO 14304502 as cited in SEQ ID NO 53212
  misc_feature (1)..(1242): Ortholog of  Ceres SEQ ID NO 15179323 as cited in SEQ ID NO 0

SEQ ID NO: 109630 - protein, 413 aa, Arabidopsis thaliana; identical to SEQ ID NO: 98391
  peptide (1)..(413): Ceres Seq. ID no. 13593508

SEQ ID NO: 109631 - protein, 353 aa, Arabidopsis thaliana; identical to SEQ ID NO: 98392
  peptide (1)..(353): Ceres Seq. ID no. 13593509

SEQ ID NO: 109632 - protein, 324 aa, Arabidopsis thaliana; identical to SEQ ID NO: 50550
  peptide (1)..(324): Ceres Seq. ID no. 13593510

SEQ ID NO: 109633 - DNA, 4114 bp, Arabidopsis thaliana; identical to SEQ ID NO: 98394
  misc_feature (1)..(4114): Ceres Seq. ID no. 13593532
  misc_feature (1)..(4114): Ortholog of  Ceres SEQ ID NO 15179695 as cited in SEQ ID NO 193

SEQ ID NO: 109634 - protein, 1252 aa, Arabidopsis thaliana; identical to SEQ ID NO: 98395
  peptide (1)..(1252): Ceres Seq. ID no. 13593533

SEQ ID NO: 109635 - protein, 1212 aa, Arabidopsis thaliana; identical to SEQ ID NO: 98396
  peptide (1)..(1212): Ceres Seq. ID no. 13593534

SEQ ID NO: 109636 - protein, 1198 aa, Arabidopsis thaliana; identical to SEQ ID NO: 98397
  peptide (1)..(1198): Ceres Seq. ID no. 13593535

SEQ ID NO: 109637 - DNA, 1077 bp, Arabidopsis thaliana; identical to SEQ ID NO: 98398
  misc_feature (1)..(1077): Ceres Seq. ID no. 13593536
  misc_feature (1)..(1077): Ortholog of  Ceres SEQ ID NO 13598416 as cited in SEQ ID NO 63371
  misc_feature (1)..(1077): Ortholog of  Ceres SEQ ID NO 13584271 as cited in SEQ ID NO 63893

SEQ ID NO: 109638 - protein, 266 aa, Arabidopsis thaliana; identical to SEQ ID NO: 47388
  peptide (1)..(266): Ceres Seq. ID no. 13593537

SEQ ID NO: 109639 - protein, 192 aa, Arabidopsis thaliana; identical to SEQ ID NO: 47389
  peptide (1)..(192): Ceres Seq. ID no. 13593538

SEQ ID NO: 109640 - protein, 169 aa, Arabidopsis thaliana; identical to SEQ ID NO: 47390
  peptide (1)..(169): Ceres Seq. ID no. 13593539

SEQ ID NO: 109641 - DNA, 1386 bp, Arabidopsis thaliana; identical to SEQ ID NO: 98402
  misc_feature (1)..(1386): Ceres Seq. ID no. 13593549
  misc_feature (1)..(1386): Ortholog of  Ceres SEQ ID NO 13595509 as cited in SEQ ID NO 59833

SEQ ID NO: 109642 - protein, 272 aa, Arabidopsis thaliana; identical to SEQ ID NO: 98403
  peptide (1)..(272): Ceres Seq. ID no. 13593550

SEQ ID NO: 109643 - protein, 250 aa, Arabidopsis thaliana; identical to SEQ ID NO: 98404
  peptide (1)..(250): Ceres Seq. ID no. 13593551

SEQ ID NO: 109644 - protein, 249 aa, Arabidopsis thaliana; identical to SEQ ID NO: 98405
  peptide (1)..(249): Ceres Seq. ID no. 13593552

SEQ ID NO: 109645 - DNA, 1556 bp, Arabidopsis thaliana; identical to SEQ ID NO: 98406
  misc_feature (1)..(1556): Ceres Seq. ID no. 13593553
  misc_feature (1)..(1556): Ortholog of  Ceres SEQ ID NO 12613795 as cited in SEQ ID NO 62089

SEQ ID NO: 109646 - protein, 378 aa, Arabidopsis thaliana; identical to SEQ ID NO: 98407
  peptide (1)..(378): Ceres Seq. ID no. 13593554

SEQ ID NO: 109647 - protein, 256 aa, Arabidopsis thaliana; identical to SEQ ID NO: 98408
  peptide (1)..(256): Ceres Seq. ID no. 13593555

SEQ ID NO: 109648 - protein, 222 aa, Arabidopsis thaliana; identical to SEQ ID NO: 98409
  peptide (1)..(222): Ceres Seq. ID no. 13593556

SEQ ID NO: 109649 - DNA, 1650 bp, Arabidopsis thaliana; identical to SEQ ID NO: 98410
  misc_feature (1)..(1650): Ceres Seq. ID no. 13593565
  misc_feature (1)..(1650): Ortholog of  Ceres SEQ ID NO 13523550 as cited in SEQ ID NO 58816

SEQ ID NO: 109650 - protein, 393 aa, Arabidopsis thaliana; identical to SEQ ID NO: 47454
  peptide (1)..(393): Ceres Seq. ID no. 13593566

SEQ ID NO: 109651 - protein, 247 aa, Arabidopsis thaliana; identical to SEQ ID NO: 47455
  peptide (1)..(247): Ceres Seq. ID no. 13593567

SEQ ID NO: 109652 - protein, 246 aa, Arabidopsis thaliana; identical to SEQ ID NO: 47456
  peptide (1)..(246): Ceres Seq. ID no. 13593568

SEQ ID NO: 109653 - DNA, 1074 bp, Arabidopsis thaliana; identical to SEQ ID NO: 98414
  misc_feature (1)..(1074): Ceres Seq. ID no. 13593579
  misc_feature (1)..(1074): Ortholog of  Ceres SEQ ID NO 14301916 as cited in SEQ ID NO 69281

SEQ ID NO: 109654 - protein, 357 aa, Arabidopsis thaliana; identical to SEQ ID NO: 98415
  peptide (1)..(357): Ceres Seq. ID no. 13593580

SEQ ID NO: 109655 - protein, 232 aa, Arabidopsis thaliana; identical to SEQ ID NO: 50008
  peptide (1)..(232): Ceres Seq. ID no. 13593581

SEQ ID NO: 109656 - protein, 204 aa, Arabidopsis thaliana; identical to SEQ ID NO: 50009
  peptide (1)..(204): Ceres Seq. ID no. 13593582

SEQ ID NO: 109657 - DNA, 447 bp, Arabidopsis thaliana; identical to SEQ ID NO: 98418
  misc_feature (1)..(447): Ceres Seq. ID no. 13593591
  misc_feature (1)..(447): Ortholog of  Ceres SEQ ID NO 15172691 as cited in SEQ ID NO 56148
  misc_feature (1)..(447): Ortholog of  Ceres SEQ ID NO 15226850 as cited in SEQ ID NO 62501

SEQ ID NO: 109658 - protein, 148 aa, Arabidopsis thaliana; identical to SEQ ID NO: 98419
  peptide (1)..(148): Ceres Seq. ID no. 13593592

SEQ ID NO: 109659 - protein, 135 aa, Arabidopsis thaliana; identical to SEQ ID NO: 98420
  peptide (1)..(135): Ceres Seq. ID no. 13593593

SEQ ID NO: 109660 - protein, 130 aa, Arabidopsis thaliana; identical to SEQ ID NO: 98421
  peptide (1)..(130): Ceres Seq. ID no. 13593594

SEQ ID NO: 109661 - DNA, 1147 bp, Arabidopsis thaliana; identical to SEQ ID NO: 98422
  misc_feature (1)..(1147): Ceres Seq. ID no. 13593595
  misc_feature (1)..(1147): Ortholog of  Ceres SEQ ID NO 14309076 as cited in SEQ ID NO 0

SEQ ID NO: 109662 - protein, 323 aa, Arabidopsis thaliana; identical to SEQ ID NO: 50207
  peptide (1)..(323): Ceres Seq. ID no. 13593596

SEQ ID NO: 109663 - protein, 182 aa, Arabidopsis thaliana; identical to SEQ ID NO: 50208
  peptide (1)..(182): Ceres Seq. ID no. 13593597

SEQ ID NO: 109664 - DNA, 1414 bp, Arabidopsis thaliana; identical to SEQ ID NO: 98425
  misc_feature (1)..(1414): Ceres Seq. ID no. 13593611
  misc_feature (1)..(1414): Ortholog of  Ceres SEQ ID NO 14311938 as cited in SEQ ID NO 51615
  misc_feature (1)..(1414): Ortholog of  Ceres SEQ ID NO 14302059 as cited in SEQ ID NO 68322

SEQ ID NO: 109665 - protein, 353 aa, Arabidopsis thaliana; identical to SEQ ID NO: 98426
  peptide (1)..(353): Ceres Seq. ID no. 13593612

SEQ ID NO: 109666 - protein, 343 aa, Arabidopsis thaliana; identical to SEQ ID NO: 98427
  peptide (1)..(343): Ceres Seq. ID no. 13593613

SEQ ID NO: 109667 - protein, 337 aa, Arabidopsis thaliana; identical to SEQ ID NO: 98428
  peptide (1)..(337): Ceres Seq. ID no. 13593614

SEQ ID NO: 109668 - DNA, 951 bp, Arabidopsis thaliana; identical to SEQ ID NO: 98429
  misc_feature (1)..(951): Ceres Seq. ID no. 13593631
  misc_feature (1)..(951): Ortholog of  Ceres SEQ ID NO 15179380 as cited in SEQ ID NO 0

SEQ ID NO: 109669 - protein, 316 aa, Arabidopsis thaliana; identical to SEQ ID NO: 98430
  peptide (1)..(316): Ceres Seq. ID no. 13593632

SEQ ID NO: 109670 - protein, 199 aa, Arabidopsis thaliana; identical to SEQ ID NO: 98431
  peptide (1)..(199): Ceres Seq. ID no. 13593633

SEQ ID NO: 109671 - DNA, 3546 bp, Arabidopsis thaliana; identical to SEQ ID NO: 98432
  misc_feature (1)..(3546): Ceres Seq. ID no. 13593638
  misc_feature (1)..(3546): Ortholog of  Ceres SEQ ID NO 13658778 as cited in SEQ ID NO 66511

SEQ ID NO: 109672 - protein, 1181 aa, Arabidopsis thaliana; identical to SEQ ID NO: 98433
  peptide (1)..(1181): Ceres Seq. ID no. 13593639

SEQ ID NO: 109673 - protein, 1108 aa, Arabidopsis thaliana; identical to SEQ ID NO: 98434
  peptide (1)..(1108): Ceres Seq. ID no. 13593640

SEQ ID NO: 109674 - protein, 1066 aa, Arabidopsis thaliana; identical to SEQ ID NO: 98435
  peptide (1)..(1066): Ceres Seq. ID no. 13593641

SEQ ID NO: 109675 - DNA, 1632 bp, Arabidopsis thaliana; identical to SEQ ID NO: 98436
  misc_feature (1)..(1632): Ceres Seq. ID no. 13593661
  misc_feature (1)..(1632): Ortholog of  Ceres SEQ ID NO 15227026 as cited in SEQ ID NO 52193
  misc_feature (1)..(1632): Ortholog of  Ceres SEQ ID NO 15177903 as cited in SEQ ID NO 54993
  misc_feature (1)..(1632): Ortholog of  Ceres SEQ ID NO 15177994 as cited in SEQ ID NO 55641
  misc_feature (1)..(1632): Ortholog of  Ceres SEQ ID NO 13595454 as cited in SEQ ID NO 56502
  misc_feature (1)..(1632): Ortholog of  Ceres SEQ ID NO 13589016 as cited in SEQ ID NO 68472

SEQ ID NO: 109676 - protein, 360 aa, Arabidopsis thaliana; identical to SEQ ID NO: 98437
  peptide (1)..(360): Ceres Seq. ID no. 13593662

SEQ ID NO: 109677 - protein, 182 aa, Arabidopsis thaliana; identical to SEQ ID NO: 98438
  peptide (1)..(182): Ceres Seq. ID no. 13593663

SEQ ID NO: 109678 - DNA, 1161 bp, Arabidopsis thaliana; identical to SEQ ID NO: 98439
  misc_feature (1)..(1161): Ceres Seq. ID no. 13593693
  misc_feature (1)..(1161): Ortholog of  Ceres SEQ ID NO 15170354 as cited in SEQ ID NO 54190
  misc_feature (1)..(1161): Ortholog of  Ceres SEQ ID NO 14307253 as cited in SEQ ID NO 54783
  misc_feature (1)..(1161): Ortholog of  Ceres SEQ ID NO 13654989 as cited in SEQ ID NO 63117
  misc_feature (1)..(1161): Ortholog of  Ceres SEQ ID NO 13584744 as cited in SEQ ID NO 69137

SEQ ID NO: 109679 - protein, 386 aa, Arabidopsis thaliana; identical to SEQ ID NO: 98440
  peptide (1)..(386): Ceres Seq. ID no. 13593694

SEQ ID NO: 109680 - protein, 377 aa, Arabidopsis thaliana; identical to SEQ ID NO: 98441
  peptide (1)..(377): Ceres Seq. ID no. 13593695

SEQ ID NO: 109681 - protein, 258 aa, Arabidopsis thaliana; identical to SEQ ID NO: 98442
  peptide (1)..(258): Ceres Seq. ID no. 13593696

SEQ ID NO: 109682 - DNA, 1965 bp, Arabidopsis thaliana; identical to SEQ ID NO: 98443
  misc_feature (1)..(1965): Ceres Seq. ID no. 13593698
  misc_feature (1)..(1965): Ortholog of  Ceres SEQ ID NO 14307940 as cited in SEQ ID NO 0
  misc_feature (1)..(1965): Ortholog of  Ceres SEQ ID NO 14308560 as cited in SEQ ID NO 0

SEQ ID NO: 109683 - protein, 566 aa, Arabidopsis thaliana; identical to SEQ ID NO: 38319
  peptide (1)..(566): Ceres Seq. ID no. 13593699

SEQ ID NO: 109684 - protein, 426 aa, Arabidopsis thaliana; identical to SEQ ID NO: 38320
  peptide (1)..(426): Ceres Seq. ID no. 13593700

SEQ ID NO: 109685 - protein, 403 aa, Arabidopsis thaliana; identical to SEQ ID NO: 38321
  peptide (1)..(403): Ceres Seq. ID no. 13593701

SEQ ID NO: 109686 - DNA, 1559 bp, Arabidopsis thaliana; identical to SEQ ID NO: 98447
  misc_feature (1)..(1559): Ceres Seq. ID no. 13593720
  misc_feature (1)..(1559): Ortholog of  Ceres SEQ ID NO 15176851 as cited in SEQ ID NO 61348

SEQ ID NO: 109687 - protein, 447 aa, Arabidopsis thaliana; identical to SEQ ID NO: 49987
  peptide (1)..(447): Ceres Seq. ID no. 13593721

SEQ ID NO: 109688 - protein, 402 aa, Arabidopsis thaliana; identical to SEQ ID NO: 49988
  peptide (1)..(402): Ceres Seq. ID no. 13593722

SEQ ID NO: 109689 - protein, 317 aa, Arabidopsis thaliana; identical to SEQ ID NO: 49989
  peptide (1)..(317): Ceres Seq. ID no. 13593723

SEQ ID NO: 109690 - DNA, 1247 bp, Arabidopsis thaliana; identical to SEQ ID NO: 98451
  misc_feature (1)..(1247): Ceres Seq. ID no. 13593724
  misc_feature (1)..(1247): Ortholog of  Ceres SEQ ID NO 15175425 as cited in SEQ ID NO 0

SEQ ID NO: 109691 - protein, 197 aa, Arabidopsis thaliana; identical to SEQ ID NO: 22405
  peptide (1)..(197): Ceres Seq. ID no. 13593725

SEQ ID NO: 109692 - DNA, 1086 bp, Arabidopsis thaliana; identical to SEQ ID NO: 98453
  misc_feature (1)..(1086): Ceres Seq. ID no. 13593730
  misc_feature (1)..(1086): Ortholog of  Ceres SEQ ID NO 13594037 as cited in SEQ ID NO 55666

SEQ ID NO: 109693 - protein, 361 aa, Arabidopsis thaliana; identical to SEQ ID NO: 98454
  peptide (1)..(361): Ceres Seq. ID no. 13593731

SEQ ID NO: 109694 - protein, 356 aa, Arabidopsis thaliana; identical to SEQ ID NO: 98455
  peptide (1)..(356): Ceres Seq. ID no. 13593732

SEQ ID NO: 109695 - protein, 196 aa, Arabidopsis thaliana; identical to SEQ ID NO: 98456
  peptide (1)..(196): Ceres Seq. ID no. 13593733

SEQ ID NO: 109696 - DNA, 1518 bp, Arabidopsis thaliana; identical to SEQ ID NO: 98457
  misc_feature (1)..(1518): Ceres Seq. ID no. 13593735
  misc_feature (1)..(1518): Ortholog of  Ceres SEQ ID NO 14308061 as cited in SEQ ID NO 55155
  misc_feature (1)..(1518): Ortholog of  Ceres SEQ ID NO 13654238 as cited in SEQ ID NO 67874

SEQ ID NO: 109697 - protein, 343 aa, Arabidopsis thaliana; identical to SEQ ID NO: 49601
  peptide (1)..(343): Ceres Seq. ID no. 13593736

SEQ ID NO: 109698 - protein, 300 aa, Arabidopsis thaliana; identical to SEQ ID NO: 49602
  peptide (1)..(300): Ceres Seq. ID no. 13593737

SEQ ID NO: 109699 - protein, 213 aa, Arabidopsis thaliana; identical to SEQ ID NO: 49603
  peptide (1)..(213): Ceres Seq. ID no. 13593738

SEQ ID NO: 109700 - DNA, 1020 bp, Arabidopsis thaliana; identical to SEQ ID NO: 98461
  misc_feature (1)..(1020): Ceres Seq. ID no. 13593740
  misc_feature (1)..(1020): Ortholog of  Ceres SEQ ID NO 14312204 as cited in SEQ ID NO 54547
  misc_feature (1)..(1020): Ortholog of  Ceres SEQ ID NO 13597633 as cited in SEQ ID NO 65444

SEQ ID NO: 109701 - protein, 339 aa, Arabidopsis thaliana; identical to SEQ ID NO: 47446
  peptide (1)..(339): Ceres Seq. ID no. 13593741

SEQ ID NO: 109702 - protein, 258 aa, Arabidopsis thaliana; identical to SEQ ID NO: 47447
  peptide (1)..(258): Ceres Seq. ID no. 13593742

SEQ ID NO: 109703 - protein, 255 aa, Arabidopsis thaliana; identical to SEQ ID NO: 47448
  peptide (1)..(255): Ceres Seq. ID no. 13593743

SEQ ID NO: 109704 - DNA, 1111 bp, Arabidopsis thaliana; identical to SEQ ID NO: 98465
  misc_feature (1)..(1111): Ceres Seq. ID no. 13593748
  misc_feature (1)..(1111): Ortholog of  Ceres SEQ ID NO 12611159 as cited in SEQ ID NO 59821

SEQ ID NO: 109705 - protein, 280 aa, Arabidopsis thaliana; identical to SEQ ID NO: 49344
  peptide (1)..(280): Ceres Seq. ID no. 13593749

SEQ ID NO: 109706 - protein, 263 aa, Arabidopsis thaliana; identical to SEQ ID NO: 49345
  peptide (1)..(263): Ceres Seq. ID no. 13593750

SEQ ID NO: 109707 - protein, 249 aa, Arabidopsis thaliana; identical to SEQ ID NO: 49346
  peptide (1)..(249): Ceres Seq. ID no. 13593751

SEQ ID NO: 109708 - DNA, 1275 bp, Arabidopsis thaliana; identical to SEQ ID NO: 98469
  misc_feature (1)..(1275): Ceres Seq. ID no. 13593756
  misc_feature (1)..(1275): Ortholog of  Ceres SEQ ID NO 13654989 as cited in SEQ ID NO 63117
  misc_feature (1)..(1275): Ortholog of  Ceres SEQ ID NO 13584744 as cited in SEQ ID NO 69137

SEQ ID NO: 109709 - protein, 424 aa, Arabidopsis thaliana; identical to SEQ ID NO: 98470
  peptide (1)..(424): Ceres Seq. ID no. 13593757

SEQ ID NO: 109710 - protein, 250 aa, Arabidopsis thaliana; identical to SEQ ID NO: 49411
  peptide (1)..(250): Ceres Seq. ID no. 13593758

SEQ ID NO: 109711 - protein, 225 aa, Arabidopsis thaliana; identical to SEQ ID NO: 98472
  peptide (1)..(225): Ceres Seq. ID no. 13593759

SEQ ID NO: 109712 - DNA, 498 bp, Arabidopsis thaliana; identical to SEQ ID NO: 98473
  misc_feature (1)..(498): Ceres Seq. ID no. 13593764
  misc_feature (1)..(498): Ortholog of  Ceres SEQ ID NO 14307370 as cited in SEQ ID NO 54127
  misc_feature (1)..(498): Ortholog of  Ceres SEQ ID NO 13596338 as cited in SEQ ID NO 68005
  misc_feature (1)..(498): Ortholog of  Ceres SEQ ID NO 14302128 as cited in SEQ ID NO 0

SEQ ID NO: 109713 - protein, 165 aa, Arabidopsis thaliana; identical to SEQ ID NO: 49479
  peptide (1)..(165): Ceres Seq. ID no. 13593765

SEQ ID NO: 109714 - protein, 132 aa, Arabidopsis thaliana; identical to SEQ ID NO: 49480
  peptide (1)..(132): Ceres Seq. ID no. 13593766

SEQ ID NO: 109715 - protein, 90 aa, Arabidopsis thaliana; identical to SEQ ID NO: 98476
  peptide (1)..(90): Ceres Seq. ID no. 13593767

SEQ ID NO: 109716 - DNA, 1725 bp, Arabidopsis thaliana; identical to SEQ ID NO: 98477
  misc_feature (1)..(1725): Ceres Seq. ID no. 13593768
  misc_feature (1)..(1725): Ortholog of  Ceres SEQ ID NO 13597269 as cited in SEQ ID NO 63932

SEQ ID NO: 109717 - protein, 494 aa, Arabidopsis thaliana; identical to SEQ ID NO: 98478
  peptide (1)..(494): Ceres Seq. ID no. 13593769

SEQ ID NO: 109718 - protein, 483 aa, Arabidopsis thaliana; identical to SEQ ID NO: 49582
  peptide (1)..(483): Ceres Seq. ID no. 13593770

SEQ ID NO: 109719 - protein, 465 aa, Arabidopsis thaliana; identical to SEQ ID NO: 49583
  peptide (1)..(465): Ceres Seq. ID no. 13593771

SEQ ID NO: 109720 - DNA, 1767 bp, Arabidopsis thaliana; identical to SEQ ID NO: 98481
  misc_feature (1)..(1767): Ceres Seq. ID no. 13593792
  misc_feature (1)..(1767): Ortholog of  Ceres SEQ ID NO 13660287 as cited in SEQ ID NO 67316

SEQ ID NO: 109721 - protein, 486 aa, Arabidopsis thaliana; identical to SEQ ID NO: 50104
  peptide (1)..(486): Ceres Seq. ID no. 13593793

SEQ ID NO: 109722 - protein, 429 aa, Arabidopsis thaliana; identical to SEQ ID NO: 50105
  peptide (1)..(429): Ceres Seq. ID no. 13593794

SEQ ID NO: 109723 - protein, 392 aa, Arabidopsis thaliana; identical to SEQ ID NO: 50106
  peptide (1)..(392): Ceres Seq. ID no. 13593795

SEQ ID NO: 109724 - DNA, 849 bp, Arabidopsis thaliana; identical to SEQ ID NO: 98485
  misc_feature (1)..(849): Ceres Seq. ID no. 13593799
  misc_feature (1)..(849): Ortholog of  Ceres SEQ ID NO 12609146 as cited in SEQ ID NO 52118
  misc_feature (1)..(849): Ortholog of  Ceres SEQ ID NO 14303397 as cited in SEQ ID NO 54614
  misc_feature (1)..(849): Ortholog of  Ceres SEQ ID NO 13594056 as cited in SEQ ID NO 55691
  misc_feature (1)..(849): Ortholog of  Ceres SEQ ID NO 14314186 as cited in SEQ ID NO 57457
  misc_feature (1)..(849): Ortholog of  Ceres SEQ ID NO 13638136 as cited in SEQ ID NO 58644
  misc_feature (1)..(849): Ortholog of  Ceres SEQ ID NO 13596868 as cited in SEQ ID NO 62806
  misc_feature (1)..(849): Ortholog of  Ceres SEQ ID NO 12587035 as cited in SEQ ID NO 63605
  misc_feature (1)..(849): Ortholog of  Ceres SEQ ID NO 13595885 as cited in SEQ ID NO 69265
  misc_feature (1)..(849): Ortholog of  Ceres SEQ ID NO 12566239 as cited in SEQ ID NO 0
  misc_feature (1)..(849): Ortholog of  Ceres SEQ ID NO 13599119 as cited in SEQ ID NO 0
  misc_feature (1)..(849): Ortholog of  Ceres SEQ ID NO 14308987 as cited in SEQ ID NO 0

SEQ ID NO: 109725 - protein, 282 aa, Arabidopsis thaliana; identical to SEQ ID NO: 98486
  peptide (1)..(282): Ceres Seq. ID no. 13593800

SEQ ID NO: 109726 - protein, 235 aa, Arabidopsis thaliana; identical to SEQ ID NO: 98487
  peptide (1)..(235): Ceres Seq. ID no. 13593801

SEQ ID NO: 109727 - protein, 148 aa, Arabidopsis thaliana; identical to SEQ ID NO: 98488
  peptide (1)..(148): Ceres Seq. ID no. 13593802

SEQ ID NO: 109728 - DNA, 1367 bp, Arabidopsis thaliana; identical to SEQ ID NO: 98489
  misc_feature (1)..(1367): Ceres Seq. ID no. 13593811
  misc_feature (1)..(1367): Ortholog of  Ceres SEQ ID NO 14310635 as cited in SEQ ID NO 53821

SEQ ID NO: 109729 - protein, 353 aa, Arabidopsis thaliana; identical to SEQ ID NO: 98490
  peptide (1)..(353): Ceres Seq. ID no. 13593812

SEQ ID NO: 109730 - protein, 343 aa, Arabidopsis thaliana; identical to SEQ ID NO: 98491
  peptide (1)..(343): Ceres Seq. ID no. 13593813

SEQ ID NO: 109731 - protein, 291 aa, Arabidopsis thaliana; identical to SEQ ID NO: 98492
  peptide (1)..(291): Ceres Seq. ID no. 13593814

SEQ ID NO: 109732 - DNA, 862 bp, Arabidopsis thaliana; identical to SEQ ID NO: 98493
  misc_feature (1)..(862): Ceres Seq. ID no. 13593826
  misc_feature (1)..(862): Ortholog of  Ceres SEQ ID NO 13594494 as cited in SEQ ID NO 51293
  misc_feature (1)..(862): Ortholog of  Ceres SEQ ID NO 13595538 as cited in SEQ ID NO 59858
  misc_feature (1)..(862): Ortholog of  Ceres SEQ ID NO 12598249 as cited in SEQ ID NO 61073
  misc_feature (1)..(862): Ortholog of  Ceres SEQ ID NO 13582815 as cited in SEQ ID NO 68106

SEQ ID NO: 109733 - protein, 177 aa, Arabidopsis thaliana; identical to SEQ ID NO: 98494
  peptide (1)..(177): Ceres Seq. ID no. 13593827

SEQ ID NO: 109734 - protein, 128 aa, Arabidopsis thaliana; identical to SEQ ID NO: 98495
  peptide (1)..(128): Ceres Seq. ID no. 13593828

SEQ ID NO: 109735 - protein, 102 aa, Arabidopsis thaliana; identical to SEQ ID NO: 98496
  peptide (1)..(102): Ceres Seq. ID no. 13593829

SEQ ID NO: 109736 - DNA, 1815 bp, Arabidopsis thaliana; identical to SEQ ID NO: 98497
  misc_feature (1)..(1815): Ceres Seq. ID no. 13600807
  misc_feature (1)..(1815): Ortholog of  Ceres SEQ ID NO 14302343 as cited in SEQ ID NO 67343

SEQ ID NO: 109737 - protein, 330 aa, Arabidopsis thaliana; identical to SEQ ID NO: 98498
  peptide (1)..(330): Ceres Seq. ID no. 13600808

SEQ ID NO: 109738 - protein, 323 aa, Arabidopsis thaliana; identical to SEQ ID NO: 98499
  peptide (1)..(323): Ceres Seq. ID no. 13600809

SEQ ID NO: 109739 - protein, 314 aa, Arabidopsis thaliana; identical to SEQ ID NO: 98500
  peptide (1)..(314): Ceres Seq. ID no. 13600810

SEQ ID NO: 109740 - DNA, 1449 bp, Arabidopsis thaliana; identical to SEQ ID NO: 98501
  misc_feature (1)..(1449): Ceres Seq. ID no. 13600892
  misc_feature (1)..(1449): Ortholog of  Ceres SEQ ID NO 14302514 as cited in SEQ ID NO 65814

SEQ ID NO: 109741 - protein, 341 aa, Arabidopsis thaliana; identical to SEQ ID NO: 24951
  peptide (1)..(341): Ceres Seq. ID no. 13600893

SEQ ID NO: 109742 - protein, 263 aa, Arabidopsis thaliana; identical to SEQ ID NO: 24952
  peptide (1)..(263): Ceres Seq. ID no. 13600894

SEQ ID NO: 109743 - protein, 215 aa, Arabidopsis thaliana; identical to SEQ ID NO: 24953
  peptide (1)..(215): Ceres Seq. ID no. 13600895

SEQ ID NO: 109744 - DNA, 973 bp, Arabidopsis thaliana; identical to SEQ ID NO: 98505
  misc_feature (1)..(973): Ceres Seq. ID no. 13600903
  misc_feature (1)..(973): Ortholog of  Ceres SEQ ID NO 13661565 as cited in SEQ ID NO 60551
  misc_feature (1)..(973): Ortholog of  Ceres SEQ ID NO 12615329 as cited in SEQ ID NO 62561

SEQ ID NO: 109745 - protein, 257 aa, Arabidopsis thaliana; identical to SEQ ID NO: 98506
  peptide (1)..(257): Ceres Seq. ID no. 13600904

SEQ ID NO: 109746 - protein, 241 aa, Arabidopsis thaliana; identical to SEQ ID NO: 43590
  peptide (1)..(241): Ceres Seq. ID no. 13600905

SEQ ID NO: 109747 - protein, 187 aa, Arabidopsis thaliana; identical to SEQ ID NO: 43591
  peptide (1)..(187): Ceres Seq. ID no. 13600906

SEQ ID NO: 109748 - DNA, 1212 bp, Arabidopsis thaliana; identical to SEQ ID NO: 98509
  misc_feature (1)..(1212): Ceres Seq. ID no. 13600910
  misc_feature (1)..(1212): Ortholog of  Ceres SEQ ID NO 12609045 as cited in SEQ ID NO 51314
  misc_feature (1)..(1212): Ortholog of  Ceres SEQ ID NO 13595877 as cited in SEQ ID NO 67702
  misc_feature (1)..(1212): Ortholog of  Ceres SEQ ID NO 13654367 as cited in SEQ ID NO 67993

SEQ ID NO: 109749 - protein, 335 aa, Arabidopsis thaliana; identical to SEQ ID NO: 98510
  peptide (1)..(335): Ceres Seq. ID no. 13600911

SEQ ID NO: 109750 - protein, 309 aa, Arabidopsis thaliana; identical to SEQ ID NO: 98511
  peptide (1)..(309): Ceres Seq. ID no. 13600912

SEQ ID NO: 109751 - DNA, 738 bp, Arabidopsis thaliana; identical to SEQ ID NO: 98512
  misc_feature (1)..(738): Ceres Seq. ID no. 13600931
  misc_feature (1)..(738): Ortholog of  Ceres SEQ ID NO 15225415 as cited in SEQ ID NO 0

SEQ ID NO: 109752 - protein, 171 aa, Arabidopsis thaliana; identical to SEQ ID NO: 39539
  peptide (1)..(171): Ceres Seq. ID no. 13600932

SEQ ID NO: 109753 - protein, 160 aa, Arabidopsis thaliana; identical to SEQ ID NO: 39540
  peptide (1)..(160): Ceres Seq. ID no. 13600933

SEQ ID NO: 109754 - protein, 157 aa, Arabidopsis thaliana; identical to SEQ ID NO: 39541
  peptide (1)..(157): Ceres Seq. ID no. 13600934

SEQ ID NO: 109755 - DNA, 1297 bp, Arabidopsis thaliana; identical to SEQ ID NO: 98516
  misc_feature (1)..(1297): Ceres Seq. ID no. 13600935
  misc_feature (1)..(1297): Ortholog of  Ceres SEQ ID NO 13597582 as cited in SEQ ID NO 65348

SEQ ID NO: 109756 - protein, 361 aa, Arabidopsis thaliana; identical to SEQ ID NO: 29371
  peptide (1)..(361): Ceres Seq. ID no. 13600936

SEQ ID NO: 109757 - protein, 303 aa, Arabidopsis thaliana; identical to SEQ ID NO: 29372
  peptide (1)..(303): Ceres Seq. ID no. 13600937

SEQ ID NO: 109758 - protein, 223 aa, Arabidopsis thaliana; identical to SEQ ID NO: 29373
  peptide (1)..(223): Ceres Seq. ID no. 13600938

SEQ ID NO: 109759 - DNA, 1157 bp, Arabidopsis thaliana; identical to SEQ ID NO: 98520
  misc_feature (1)..(1157): Ceres Seq. ID no. 13600939
  misc_feature (1)..(1157): Ortholog of  Ceres SEQ ID NO 13639476 as cited in SEQ ID NO 58353

SEQ ID NO: 109760 - protein, 280 aa, Arabidopsis thaliana; identical to SEQ ID NO: 98521
  peptide (1)..(280): Ceres Seq. ID no. 13600940

SEQ ID NO: 109761 - DNA, 1259 bp, Arabidopsis thaliana; identical to SEQ ID NO: 98522
  misc_feature (1)..(1259): Ceres Seq. ID no. 13600945
  misc_feature (1)..(1259): Ortholog of  Ceres SEQ ID NO 15177676 as cited in SEQ ID NO 52631
  misc_feature (1)..(1259): Ortholog of  Ceres SEQ ID NO 14314212 as cited in SEQ ID NO 57401

SEQ ID NO: 109762 - protein, 396 aa, Arabidopsis thaliana; identical to SEQ ID NO: 98523
  peptide (1)..(396): Ceres Seq. ID no. 13600946

SEQ ID NO: 109763 - protein, 391 aa, Arabidopsis thaliana; identical to SEQ ID NO: 98524
  peptide (1)..(391): Ceres Seq. ID no. 13600947

SEQ ID NO: 109764 - protein, 252 aa, Arabidopsis thaliana; identical to SEQ ID NO: 42894
  peptide (1)..(252): Ceres Seq. ID no. 13600948

SEQ ID NO: 109765 - DNA, 1535 bp, Arabidopsis thaliana; identical to SEQ ID NO: 98526
  misc_feature (1)..(1535): Ceres Seq. ID no. 13600949
  misc_feature (1)..(1535): Ortholog of  Ceres SEQ ID NO 15177676 as cited in SEQ ID NO 52631
  misc_feature (1)..(1535): Ortholog of  Ceres SEQ ID NO 14314212 as cited in SEQ ID NO 57401
  misc_feature (1)..(1535): Ortholog of  Ceres SEQ ID NO 13596376 as cited in SEQ ID NO 68056

SEQ ID NO: 109766 - protein, 425 aa, Arabidopsis thaliana; identical to SEQ ID NO: 98527
  peptide (1)..(425): Ceres Seq. ID no. 13600950

SEQ ID NO: 109767 - protein, 405 aa, Arabidopsis thaliana; identical to SEQ ID NO: 98528
  peptide (1)..(405): Ceres Seq. ID no. 13600951

SEQ ID NO: 109768 - DNA, 1330 bp, Arabidopsis thaliana; identical to SEQ ID NO: 98529
  misc_feature (1)..(1330): Ceres Seq. ID no. 13600952
  misc_feature (1)..(1330): Ortholog of  Ceres SEQ ID NO 15177676 as cited in SEQ ID NO 52631
  misc_feature (1)..(1330): Ortholog of  Ceres SEQ ID NO 14314212 as cited in SEQ ID NO 57401

SEQ ID NO: 109769 - protein, 386 aa, Arabidopsis thaliana; identical to SEQ ID NO: 25101
  peptide (1)..(386): Ceres Seq. ID no. 13600953

SEQ ID NO: 109770 - protein, 249 aa, Arabidopsis thaliana; identical to SEQ ID NO: 25102
  peptide (1)..(249): Ceres Seq. ID no. 13600954

SEQ ID NO: 109771 - protein, 215 aa, Arabidopsis thaliana; identical to SEQ ID NO: 25103
  peptide (1)..(215): Ceres Seq. ID no. 13600955

SEQ ID NO: 109772 - DNA, 1376 bp, Arabidopsis thaliana; identical to SEQ ID NO: 98533
  misc_feature (1)..(1376): Ceres Seq. ID no. 13600960
  misc_feature (1)..(1376): Ortholog of  Ceres SEQ ID NO 14302820 as cited in SEQ ID NO 63287

SEQ ID NO: 109773 - protein, 360 aa, Arabidopsis thaliana; identical to SEQ ID NO: 98534
  peptide (1)..(360): Ceres Seq. ID no. 13600961

SEQ ID NO: 109774 - protein, 249 aa, Arabidopsis thaliana; identical to SEQ ID NO: 98535
  peptide (1)..(249): Ceres Seq. ID no. 13600962

SEQ ID NO: 109775 - protein, 217 aa, Arabidopsis thaliana; identical to SEQ ID NO: 98536
  peptide (1)..(217): Ceres Seq. ID no. 13600963

SEQ ID NO: 109776 - DNA, 1667 bp, Arabidopsis thaliana; identical to SEQ ID NO: 98537
  misc_feature (1)..(1667): Ceres Seq. ID no. 13600968
  misc_feature (1)..(1667): Ortholog of  Ceres SEQ ID NO 14307210 as cited in SEQ ID NO 54833

SEQ ID NO: 109777 - protein, 226 aa, Arabidopsis thaliana; identical to SEQ ID NO: 98538
  peptide (1)..(226): Ceres Seq. ID no. 13600969

SEQ ID NO: 109778 - protein, 210 aa, Arabidopsis thaliana; identical to SEQ ID NO: 98539
  peptide (1)..(210): Ceres Seq. ID no. 13600970

SEQ ID NO: 109779 - protein, 155 aa, Arabidopsis thaliana; identical to SEQ ID NO: 25560
  peptide (1)..(155): Ceres Seq. ID no. 13600971

SEQ ID NO: 109780 - DNA, 1416 bp, Arabidopsis thaliana; identical to SEQ ID NO: 98541
  misc_feature (1)..(1416): Ceres Seq. ID no. 13600972
  misc_feature (1)..(1416): Ortholog of  Ceres SEQ ID NO 14308851 as cited in SEQ ID NO 55618

SEQ ID NO: 109781 - protein, 377 aa, Arabidopsis thaliana; identical to SEQ ID NO: 24317
  peptide (1)..(377): Ceres Seq. ID no. 13600973

SEQ ID NO: 109782 - protein, 360 aa, Arabidopsis thaliana; identical to SEQ ID NO: 24318
  peptide (1)..(360): Ceres Seq. ID no. 13600974

SEQ ID NO: 109783 - protein, 332 aa, Arabidopsis thaliana; identical to SEQ ID NO: 24319
  peptide (1)..(332): Ceres Seq. ID no. 13600975

SEQ ID NO: 109784 - DNA, 1459 bp, Arabidopsis thaliana; identical to SEQ ID NO: 98545
  misc_feature (1)..(1459): Ceres Seq. ID no. 13600976
  misc_feature (1)..(1459): Ortholog of  Ceres SEQ ID NO 15177298 as cited in SEQ ID NO 52711

SEQ ID NO: 109785 - protein, 383 aa, Arabidopsis thaliana; identical to SEQ ID NO: 39928
  peptide (1)..(383): Ceres Seq. ID no. 13600977

SEQ ID NO: 109786 - protein, 377 aa, Arabidopsis thaliana; identical to SEQ ID NO: 39929
  peptide (1)..(377): Ceres Seq. ID no. 13600978

SEQ ID NO: 109787 - protein, 204 aa, Arabidopsis thaliana; identical to SEQ ID NO: 39930
  peptide (1)..(204): Ceres Seq. ID no. 13600979

SEQ ID NO: 109788 - DNA, 1180 bp, Arabidopsis thaliana; identical to SEQ ID NO: 98549
  misc_feature (1)..(1180): Ceres Seq. ID no. 13600988
  misc_feature (1)..(1180): Ortholog of  Ceres SEQ ID NO 15226198 as cited in SEQ ID NO 62150

SEQ ID NO: 109789 - protein, 299 aa, Arabidopsis thaliana; identical to SEQ ID NO: 98550
  peptide (1)..(299): Ceres Seq. ID no. 13600989

SEQ ID NO: 109790 - protein, 161 aa, Arabidopsis thaliana; identical to SEQ ID NO: 35870
  peptide (1)..(161): Ceres Seq. ID no. 13600990

SEQ ID NO: 109791 - DNA, 771 bp, Arabidopsis thaliana; identical to SEQ ID NO: 98552
  misc_feature (1)..(771): Ceres Seq. ID no. 13600991
  misc_feature (1)..(771): Ortholog of  Ceres SEQ ID NO 15225940 as cited in SEQ ID NO 205

SEQ ID NO: 109792 - protein, 220 aa, Arabidopsis thaliana; identical to SEQ ID NO: 98553
  peptide (1)..(220): Ceres Seq. ID no. 13600992

SEQ ID NO: 109793 - DNA, 1341 bp, Arabidopsis thaliana; identical to SEQ ID NO: 98554
  misc_feature (1)..(1341): Ceres Seq. ID no. 13600997
  misc_feature (1)..(1341): Ortholog of  Ceres SEQ ID NO 15174737 as cited in SEQ ID NO 52912
  misc_feature (1)..(1341): Ortholog of  Ceres SEQ ID NO 13624551 as cited in SEQ ID NO 0

SEQ ID NO: 109794 - protein, 312 aa, Arabidopsis thaliana; identical to SEQ ID NO: 98555
  peptide (1)..(312): Ceres Seq. ID no. 13600998

SEQ ID NO: 109795 - protein, 299 aa, Arabidopsis thaliana; identical to SEQ ID NO: 98556
  peptide (1)..(299): Ceres Seq. ID no. 13600999

SEQ ID NO: 109796 - protein, 289 aa, Arabidopsis thaliana; identical to SEQ ID NO: 98557
  peptide (1)..(289): Ceres Seq. ID no. 13601000

SEQ ID NO: 109797 - DNA, 1125 bp, Arabidopsis thaliana; identical to SEQ ID NO: 98558
  misc_feature (1)..(1125): Ceres Seq. ID no. 13601001
  misc_feature (1)..(1125): Ortholog of  Ceres SEQ ID NO 12609314 as cited in SEQ ID NO 51796
  misc_feature (1)..(1125): Ortholog of  Ceres SEQ ID NO 15226254 as cited in SEQ ID NO 68176

SEQ ID NO: 109798 - protein, 250 aa, Arabidopsis thaliana; identical to SEQ ID NO: 21216
  peptide (1)..(250): Ceres Seq. ID no. 13601002

SEQ ID NO: 109799 - protein, 177 aa, Arabidopsis thaliana; identical to SEQ ID NO: 21217
  peptide (1)..(177): Ceres Seq. ID no. 13601003

SEQ ID NO: 109800 - protein, 148 aa, Arabidopsis thaliana; identical to SEQ ID NO: 21218
  peptide (1)..(148): Ceres Seq. ID no. 13601004

SEQ ID NO: 109801 - DNA, 6308 bp, Arabidopsis thaliana; identical to SEQ ID NO: 98562
  misc_feature (1)..(6308): Ceres Seq. ID no. 13601005
  misc_feature (1)..(6308): Ortholog of  Ceres SEQ ID NO 14313034 as cited in SEQ ID NO 54449

SEQ ID NO: 109802 - protein, 2073 aa, Arabidopsis thaliana; identical to SEQ ID NO: 98563
  peptide (1)..(2073): Ceres Seq. ID no. 13601006

SEQ ID NO: 109803 - protein, 2054 aa, Arabidopsis thaliana; identical to SEQ ID NO: 98564
  peptide (1)..(2054): Ceres Seq. ID no. 13601007

SEQ ID NO: 109804 - protein, 2041 aa, Arabidopsis thaliana; identical to SEQ ID NO: 98565
  peptide (1)..(2041): Ceres Seq. ID no. 13601008

SEQ ID NO: 109805 - DNA, 1142 bp, Arabidopsis thaliana; identical to SEQ ID NO: 98566
  misc_feature (1)..(1142): Ceres Seq. ID no. 13601020
  misc_feature (1)..(1142): Ortholog of  Ceres SEQ ID NO 12618197 as cited in SEQ ID NO 64478

SEQ ID NO: 109806 - protein, 307 aa, Arabidopsis thaliana; identical to SEQ ID NO: 98567
  peptide (1)..(307): Ceres Seq. ID no. 13601021

SEQ ID NO: 109807 - protein, 300 aa, Arabidopsis thaliana; identical to SEQ ID NO: 98568
  peptide (1)..(300): Ceres Seq. ID no. 13601022

SEQ ID NO: 109808 - protein, 247 aa, Arabidopsis thaliana; identical to SEQ ID NO: 98569
  peptide (1)..(247): Ceres Seq. ID no. 13601023

SEQ ID NO: 109809 - DNA, 949 bp, Arabidopsis thaliana; identical to SEQ ID NO: 98570
  misc_feature (1)..(949): Ceres Seq. ID no. 13601030
  misc_feature (1)..(949): Ortholog of  Ceres SEQ ID NO 12610908 as cited in SEQ ID NO 55869
  misc_feature (1)..(949): Ortholog of  Ceres SEQ ID NO 14302449 as cited in SEQ ID NO 62344

SEQ ID NO: 109810 - protein, 230 aa, Arabidopsis thaliana; identical to SEQ ID NO: 98571
  peptide (1)..(230): Ceres Seq. ID no. 13601031

SEQ ID NO: 109811 - DNA, 868 bp, Arabidopsis thaliana; identical to SEQ ID NO: 98572
  misc_feature (1)..(868): Ceres Seq. ID no. 13601044
  misc_feature (1)..(868): Ortholog of  Ceres SEQ ID NO 13622227 as cited in SEQ ID NO 413

SEQ ID NO: 109812 - protein, 215 aa, Arabidopsis thaliana; identical to SEQ ID NO: 98573
  peptide (1)..(215): Ceres Seq. ID no. 13601045

SEQ ID NO: 109813 - protein, 209 aa, Arabidopsis thaliana; identical to SEQ ID NO: 98574
  peptide (1)..(209): Ceres Seq. ID no. 13601046

SEQ ID NO: 109814 - protein, 183 aa, Arabidopsis thaliana; identical to SEQ ID NO: 98575
  peptide (1)..(183): Ceres Seq. ID no. 13601047

SEQ ID NO: 109815 - DNA, 834 bp, Arabidopsis thaliana; identical to SEQ ID NO: 98576
  misc_feature (1)..(834): Ceres Seq. ID no. 13601052
  misc_feature (1)..(834): Ortholog of  Ceres SEQ ID NO 12611008 as cited in SEQ ID NO 56180
  misc_feature (1)..(834): Ortholog of  Ceres SEQ ID NO 15179480 as cited in SEQ ID NO 0

SEQ ID NO: 109816 - protein, 157 aa, Arabidopsis thaliana; identical to SEQ ID NO: 21713
  peptide (1)..(157): Ceres Seq. ID no. 13601053

SEQ ID NO: 109817 - protein, 79 aa, Arabidopsis thaliana; identical to SEQ ID NO: 98578
  peptide (1)..(79): Ceres Seq. ID no. 13601054

SEQ ID NO: 109818 - DNA, 2052 bp, Arabidopsis thaliana; identical to SEQ ID NO: 98579
  misc_feature (1)..(2052): Ceres Seq. ID no. 13601055
  misc_feature (1)..(2052): Ortholog of  Ceres SEQ ID NO 13587235 as cited in SEQ ID NO 0

SEQ ID NO: 109819 - protein, 447 aa, Arabidopsis thaliana; identical to SEQ ID NO: 40107
  peptide (1)..(447): Ceres Seq. ID no. 13601056

SEQ ID NO: 109820 - protein, 436 aa, Arabidopsis thaliana; identical to SEQ ID NO: 40108
  peptide (1)..(436): Ceres Seq. ID no. 13601057

SEQ ID NO: 109821 - protein, 429 aa, Arabidopsis thaliana; identical to SEQ ID NO: 40109
  peptide (1)..(429): Ceres Seq. ID no. 13601058

SEQ ID NO: 109822 - DNA, 1365 bp, Arabidopsis thaliana; identical to SEQ ID NO: 98583
  misc_feature (1)..(1365): Ceres Seq. ID no. 13601063
  misc_feature (1)..(1365): Ortholog of  Ceres SEQ ID NO 13595222 as cited in SEQ ID NO 56312
  misc_feature (1)..(1365): Ortholog of  Ceres SEQ ID NO 13654209 as cited in SEQ ID NO 62121
  misc_feature (1)..(1365): Ortholog of  Ceres SEQ ID NO 13596965 as cited in SEQ ID NO 63363

SEQ ID NO: 109823 - protein, 321 aa, Arabidopsis thaliana; identical to SEQ ID NO: 28682
  peptide (1)..(321): Ceres Seq. ID no. 13601064

SEQ ID NO: 109824 - protein, 266 aa, Arabidopsis thaliana; identical to SEQ ID NO: 28683
  peptide (1)..(266): Ceres Seq. ID no. 13601065

SEQ ID NO: 109825 - protein, 183 aa, Arabidopsis thaliana; identical to SEQ ID NO: 28684
  peptide (1)..(183): Ceres Seq. ID no. 13601066

SEQ ID NO: 109826 - DNA, 1052 bp, Arabidopsis thaliana; identical to SEQ ID NO: 98587
  misc_feature (1)..(1052): Ceres Seq. ID no. 13601075
  misc_feature (1)..(1052): Ortholog of  Ceres SEQ ID NO 13583408 as cited in SEQ ID NO 62616
  misc_feature (1)..(1052): Ortholog of  Ceres SEQ ID NO 15179752 as cited in SEQ ID NO 63074

SEQ ID NO: 109827 - protein, 244 aa, Arabidopsis thaliana; identical to SEQ ID NO: 40188
  peptide (1)..(244): Ceres Seq. ID no. 13601076

SEQ ID NO: 109828 - DNA, 837 bp, Arabidopsis thaliana; identical to SEQ ID NO: 98589
  misc_feature (1)..(837): Ceres Seq. ID no. 13601081
  misc_feature (1)..(837): Ortholog of  Ceres SEQ ID NO 14312416 as cited in SEQ ID NO 55270
  misc_feature (1)..(837): Ortholog of  Ceres SEQ ID NO 15225352 as cited in SEQ ID NO 67888

SEQ ID NO: 109829 - protein, 159 aa, Arabidopsis thaliana; identical to SEQ ID NO: 98590
  peptide (1)..(159): Ceres Seq. ID no. 13601082

SEQ ID NO: 109830 - protein, 107 aa, Arabidopsis thaliana; identical to SEQ ID NO: 98591
  peptide (1)..(107): Ceres Seq. ID no. 13601083

SEQ ID NO: 109831 - protein, 99 aa, Arabidopsis thaliana; identical to SEQ ID NO: 98592
  peptide (1)..(99): Ceres Seq. ID no. 13601084

SEQ ID NO: 109832 - DNA, 1046 bp, Arabidopsis thaliana; identical to SEQ ID NO: 98593
  misc_feature (1)..(1046): Ceres Seq. ID no. 13601085
  misc_feature (1)..(1046): Ortholog of  Ceres SEQ ID NO 14316165 as cited in SEQ ID NO 52560
  misc_feature (1)..(1046): Ortholog of  Ceres SEQ ID NO 13597076 as cited in SEQ ID NO 63571

SEQ ID NO: 109833 - protein, 318 aa, Arabidopsis thaliana; identical to SEQ ID NO: 98594
  peptide (1)..(318): Ceres Seq. ID no. 13601086

SEQ ID NO: 109834 - protein, 308 aa, Arabidopsis thaliana; identical to SEQ ID NO: 98595
  peptide (1)..(308): Ceres Seq. ID no. 13601087

SEQ ID NO: 109835 - protein, 285 aa, Arabidopsis thaliana; identical to SEQ ID NO: 98596
  peptide (1)..(285): Ceres Seq. ID no. 13601088

SEQ ID NO: 109836 - DNA, 1846 bp, Arabidopsis thaliana; identical to SEQ ID NO: 98597
  misc_feature (1)..(1846): Ceres Seq. ID no. 13601089
  misc_feature (1)..(1846): Ortholog of  Ceres SEQ ID NO 14314108 as cited in SEQ ID NO 63184
  misc_feature (1)..(1846): Ortholog of  Ceres SEQ ID NO 13658253 as cited in SEQ ID NO 66650

SEQ ID NO: 109837 - protein, 443 aa, Arabidopsis thaliana; identical to SEQ ID NO: 98598
  peptide (1)..(443): Ceres Seq. ID no. 13601090

SEQ ID NO: 109838 - protein, 431 aa, Arabidopsis thaliana; identical to SEQ ID NO: 24290
  peptide (1)..(431): Ceres Seq. ID no. 13601091

SEQ ID NO: 109839 - protein, 375 aa, Arabidopsis thaliana; identical to SEQ ID NO: 24291
  peptide (1)..(375): Ceres Seq. ID no. 13601092

SEQ ID NO: 109840 - DNA, 1202 bp, Arabidopsis thaliana; identical to SEQ ID NO: 98601
  misc_feature (1)..(1202): Ceres Seq. ID no. 13601096
  misc_feature (1)..(1202): Ortholog of  Ceres SEQ ID NO 14311659 as cited in SEQ ID NO 51212
  misc_feature (1)..(1202): Ortholog of  Ceres SEQ ID NO 12635180 as cited in SEQ ID NO 0

SEQ ID NO: 109841 - protein, 332 aa, Arabidopsis thaliana; identical to SEQ ID NO: 98602
  peptide (1)..(332): Ceres Seq. ID no. 13601097

SEQ ID NO: 109842 - protein, 230 aa, Arabidopsis thaliana; identical to SEQ ID NO: 23855
  peptide (1)..(230): Ceres Seq. ID no. 13601098

SEQ ID NO: 109843 - protein, 169 aa, Arabidopsis thaliana; identical to SEQ ID NO: 23856
  peptide (1)..(169): Ceres Seq. ID no. 13601099

SEQ ID NO: 109844 - DNA, 2350 bp, Arabidopsis thaliana; identical to SEQ ID NO: 98605
  misc_feature (1)..(2350): Ceres Seq. ID no. 13601100
  misc_feature (1)..(2350): Ortholog of  Ceres SEQ ID NO 13656177 as cited in SEQ ID NO 64997

SEQ ID NO: 109845 - protein, 671 aa, Arabidopsis thaliana; identical to SEQ ID NO: 27774
  peptide (1)..(671): Ceres Seq. ID no. 13601101

SEQ ID NO: 109846 - protein, 667 aa, Arabidopsis thaliana; identical to SEQ ID NO: 27775
  peptide (1)..(667): Ceres Seq. ID no. 13601102

SEQ ID NO: 109847 - protein, 657 aa, Arabidopsis thaliana; identical to SEQ ID NO: 27776
  peptide (1)..(657): Ceres Seq. ID no. 13601103

SEQ ID NO: 109848 - DNA, 812 bp, Arabidopsis thaliana; identical to SEQ ID NO: 98609
  misc_feature (1)..(812): Ceres Seq. ID no. 13601104
  misc_feature (1)..(812): Ortholog of  Ceres SEQ ID NO 15178899 as cited in SEQ ID NO 0

SEQ ID NO: 109849 - protein, 227 aa, Arabidopsis thaliana; identical to SEQ ID NO: 98610
  peptide (1)..(227): Ceres Seq. ID no. 13601105

SEQ ID NO: 109850 - protein, 223 aa, Arabidopsis thaliana; identical to SEQ ID NO: 21019
  peptide (1)..(223): Ceres Seq. ID no. 13601106

SEQ ID NO: 109851 - DNA, 1317 bp, Arabidopsis thaliana; identical to SEQ ID NO: 98612
  misc_feature (1)..(1317): Ceres Seq. ID no. 13601118
  misc_feature (1)..(1317): Ortholog of  Ceres SEQ ID NO 15177059 as cited in SEQ ID NO 60196

SEQ ID NO: 109852 - protein, 309 aa, Arabidopsis thaliana; identical to SEQ ID NO: 35573
  peptide (1)..(309): Ceres Seq. ID no. 13601119

SEQ ID NO: 109853 - protein, 267 aa, Arabidopsis thaliana; identical to SEQ ID NO: 35574
  peptide (1)..(267): Ceres Seq. ID no. 13601120

SEQ ID NO: 109854 - protein, 212 aa, Arabidopsis thaliana; identical to SEQ ID NO: 35575
  peptide (1)..(212): Ceres Seq. ID no. 13601121

SEQ ID NO: 109855 - DNA, 1789 bp, Arabidopsis thaliana; identical to SEQ ID NO: 98616
  misc_feature (1)..(1789): Ceres Seq. ID no. 13601125
  misc_feature (1)..(1789): Ortholog of  Ceres SEQ ID NO 13595201 as cited in SEQ ID NO 56606

SEQ ID NO: 109856 - protein, 477 aa, Arabidopsis thaliana; identical to SEQ ID NO: 40931
  peptide (1)..(477): Ceres Seq. ID no. 13601126

SEQ ID NO: 109857 - protein, 476 aa, Arabidopsis thaliana; identical to SEQ ID NO: 40932
  peptide (1)..(476): Ceres Seq. ID no. 13601127

SEQ ID NO: 109858 - DNA, 713 bp, Arabidopsis thaliana; identical to SEQ ID NO: 98619
  misc_feature (1)..(713): Ceres Seq. ID no. 13601128
  misc_feature (1)..(713): Ortholog of  Ceres SEQ ID NO 13648568 as cited in SEQ ID NO 20436

SEQ ID NO: 109859 - protein, 161 aa, Arabidopsis thaliana; identical to SEQ ID NO: 98620
  peptide (1)..(161): Ceres Seq. ID no. 13601129

SEQ ID NO: 109860 - DNA, 1065 bp, Arabidopsis thaliana; identical to SEQ ID NO: 98621
  misc_feature (1)..(1065): Ceres Seq. ID no. 13601134
  misc_feature (1)..(1065): Ortholog of  Ceres SEQ ID NO 14304830 as cited in SEQ ID NO 54884
  misc_feature (1)..(1065): Ortholog of  Ceres SEQ ID NO 14316297 as cited in SEQ ID NO 57465
  misc_feature (1)..(1065): Ortholog of  Ceres SEQ ID NO 12784351 as cited in SEQ ID NO 60968
  misc_feature (1)..(1065): Ortholog of  Ceres SEQ ID NO 13584213 as cited in SEQ ID NO 63690

SEQ ID NO: 109861 - protein, 268 aa, Arabidopsis thaliana; identical to SEQ ID NO: 98622
  peptide (1)..(268): Ceres Seq. ID no. 13601135

SEQ ID NO: 109862 - protein, 242 aa, Arabidopsis thaliana; identical to SEQ ID NO: 37221
  peptide (1)..(242): Ceres Seq. ID no. 13601136

SEQ ID NO: 109863 - DNA, 1437 bp, Arabidopsis thaliana; identical to SEQ ID NO: 98624
  misc_feature (1)..(1437): Ceres Seq. ID no. 13601143
  misc_feature (1)..(1437): Ortholog of  Ceres SEQ ID NO 12590542 as cited in SEQ ID NO 621
  misc_feature (1)..(1437): Ortholog of  Ceres SEQ ID NO 12421854 as cited in SEQ ID NO 20723
  misc_feature (1)..(1437): Ortholog of  Ceres SEQ ID NO 13597847 as cited in SEQ ID NO 64858

SEQ ID NO: 109864 - protein, 365 aa, Arabidopsis thaliana; identical to SEQ ID NO: 98625
  peptide (1)..(365): Ceres Seq. ID no. 13601144

SEQ ID NO: 109865 - protein, 269 aa, Arabidopsis thaliana; identical to SEQ ID NO: 98626
  peptide (1)..(269): Ceres Seq. ID no. 13601145

SEQ ID NO: 109866 - protein, 254 aa, Arabidopsis thaliana; identical to SEQ ID NO: 98627
  peptide (1)..(254): Ceres Seq. ID no. 13601146

SEQ ID NO: 109867 - DNA, 3026 bp, Arabidopsis thaliana; identical to SEQ ID NO: 98628
  misc_feature (1)..(3026): Ceres Seq. ID no. 13601159
  misc_feature (1)..(3026): Ortholog of  Ceres SEQ ID NO 15224454 as cited in SEQ ID NO 0

SEQ ID NO: 109868 - protein, 911 aa, Arabidopsis thaliana; identical to SEQ ID NO: 98629
  peptide (1)..(911): Ceres Seq. ID no. 13601160

SEQ ID NO: 109869 - protein, 910 aa, Arabidopsis thaliana; identical to SEQ ID NO: 98630
  peptide (1)..(910): Ceres Seq. ID no. 13601161

SEQ ID NO: 109870 - protein, 880 aa, Arabidopsis thaliana; identical to SEQ ID NO: 98631
  peptide (1)..(880): Ceres Seq. ID no. 13601162

SEQ ID NO: 109871 - DNA, 1623 bp, Arabidopsis thaliana; identical to SEQ ID NO: 98632
  misc_feature (1)..(1623): Ceres Seq. ID no. 13601163
  misc_feature (1)..(1623): Ortholog of  Ceres SEQ ID NO 15169603 as cited in SEQ ID NO 65772
  misc_feature (1)..(1623): Ortholog of  Ceres SEQ ID NO 14308003 as cited in SEQ ID NO 65919
  misc_feature (1)..(1623): Ortholog of  Ceres SEQ ID NO 14303087 as cited in SEQ ID NO 66569

SEQ ID NO: 109872 - protein, 528 aa, Arabidopsis thaliana; identical to SEQ ID NO: 98633
  peptide (1)..(528): Ceres Seq. ID no. 13601164

SEQ ID NO: 109873 - protein, 510 aa, Arabidopsis thaliana; identical to SEQ ID NO: 98634
  peptide (1)..(510): Ceres Seq. ID no. 13601165

SEQ ID NO: 109874 - protein, 508 aa, Arabidopsis thaliana; identical to SEQ ID NO: 98635
  peptide (1)..(508): Ceres Seq. ID no. 13601166

SEQ ID NO: 109875 - DNA, 1041 bp, Arabidopsis thaliana; identical to SEQ ID NO: 98636
  misc_feature (1)..(1041): Ceres Seq. ID no. 13601171
  misc_feature (1)..(1041): Ortholog of  Ceres SEQ ID NO 13590233 as cited in SEQ ID NO 64652

SEQ ID NO: 109876 - protein, 252 aa, Arabidopsis thaliana; identical to SEQ ID NO: 98637
  peptide (1)..(252): Ceres Seq. ID no. 13601172

SEQ ID NO: 109877 - DNA, 1199 bp, Arabidopsis thaliana; identical to SEQ ID NO: 98638
  misc_feature (1)..(1199): Ceres Seq. ID no. 13601185
  misc_feature (1)..(1199): Ortholog of  Ceres SEQ ID NO 15174890 as cited in SEQ ID NO 53624

SEQ ID NO: 109878 - protein, 300 aa, Arabidopsis thaliana; identical to SEQ ID NO: 98136
  peptide (1)..(300): Ceres Seq. ID no. 13601186

SEQ ID NO: 109879 - protein, 232 aa, Arabidopsis thaliana; identical to SEQ ID NO: 98137
  peptide (1)..(232): Ceres Seq. ID no. 13601187

SEQ ID NO: 109880 - protein, 211 aa, Arabidopsis thaliana; identical to SEQ ID NO: 98138
  peptide (1)..(211): Ceres Seq. ID no. 13601188

SEQ ID NO: 109881 - DNA, 1713 bp, Arabidopsis thaliana; identical to SEQ ID NO: 98642
  misc_feature (1)..(1713): Ceres Seq. ID no. 13601189
  misc_feature (1)..(1713): Ortholog of  Ceres SEQ ID NO 13546266 as cited in SEQ ID NO 65659

SEQ ID NO: 109882 - protein, 501 aa, Arabidopsis thaliana; identical to SEQ ID NO: 98643
  peptide (1)..(501): Ceres Seq. ID no. 13601190

SEQ ID NO: 109883 - protein, 364 aa, Arabidopsis thaliana; identical to SEQ ID NO: 98644
  peptide (1)..(364): Ceres Seq. ID no. 13601191

SEQ ID NO: 109884 - protein, 345 aa, Arabidopsis thaliana; identical to SEQ ID NO: 98645
  peptide (1)..(345): Ceres Seq. ID no. 13601192

SEQ ID NO: 109885 - DNA, 1422 bp, Arabidopsis thaliana; identical to SEQ ID NO: 98646
  misc_feature (1)..(1422): Ceres Seq. ID no. 13601197
  misc_feature (1)..(1422): Ortholog of  Ceres SEQ ID NO 14301916 as cited in SEQ ID NO 69281

SEQ ID NO: 109886 - protein, 393 aa, Arabidopsis thaliana; identical to SEQ ID NO: 98647
  peptide (1)..(393): Ceres Seq. ID no. 13601198

SEQ ID NO: 109887 - protein, 289 aa, Arabidopsis thaliana; identical to SEQ ID NO: 98648
  peptide (1)..(289): Ceres Seq. ID no. 13601199

SEQ ID NO: 109888 - protein, 266 aa, Arabidopsis thaliana; identical to SEQ ID NO: 98649
  peptide (1)..(266): Ceres Seq. ID no. 13601200

SEQ ID NO: 109889 - DNA, 3631 bp, Arabidopsis thaliana; identical to SEQ ID NO: 98650
  misc_feature (1)..(3631): Ceres Seq. ID no. 13601204
  misc_feature (1)..(3631): Ortholog of  Ceres SEQ ID NO 14310024 as cited in SEQ ID NO 20634
  misc_feature (1)..(3631): Ortholog of  Ceres SEQ ID NO 12587358 as cited in SEQ ID NO 62228
  misc_feature (1)..(3631): Ortholog of  Ceres SEQ ID NO 12635930 as cited in SEQ ID NO 0

SEQ ID NO: 109890 - protein, 1164 aa, Arabidopsis thaliana; identical to SEQ ID NO: 98651
  peptide (1)..(1164): Ceres Seq. ID no. 13601205

SEQ ID NO: 109891 - protein, 1106 aa, Arabidopsis thaliana; identical to SEQ ID NO: 98652
  peptide (1)..(1106): Ceres Seq. ID no. 13601206

SEQ ID NO: 109892 - protein, 932 aa, Arabidopsis thaliana; identical to SEQ ID NO: 98653
  peptide (1)..(932): Ceres Seq. ID no. 13601207

SEQ ID NO: 109893 - DNA, 797 bp, Arabidopsis thaliana; identical to SEQ ID NO: 98654
  misc_feature (1)..(797): Ceres Seq. ID no. 13601208
  misc_feature (1)..(797): Ortholog of  Ceres SEQ ID NO 13595158 as cited in SEQ ID NO 51008
  misc_feature (1)..(797): Ortholog of  Ceres SEQ ID NO 14304144 as cited in SEQ ID NO 59152
  misc_feature (1)..(797): Ortholog of  Ceres SEQ ID NO 13662050 as cited in SEQ ID NO 61580
  misc_feature (1)..(797): Ortholog of  Ceres SEQ ID NO 14309388 as cited in SEQ ID NO 0

SEQ ID NO: 109894 - protein, 176 aa, Arabidopsis thaliana; identical to SEQ ID NO: 43604
  peptide (1)..(176): Ceres Seq. ID no. 13601209

SEQ ID NO: 109895 - protein, 117 aa, Arabidopsis thaliana; identical to SEQ ID NO: 43605
  peptide (1)..(117): Ceres Seq. ID no. 13601210

SEQ ID NO: 109896 - DNA, 747 bp, Arabidopsis thaliana; identical to SEQ ID NO: 98657
  misc_feature (1)..(747): Ceres Seq. ID no. 13601223
  misc_feature (1)..(747): Ortholog of  Ceres SEQ ID NO 12584790 as cited in SEQ ID NO 62648
  misc_feature (1)..(747): Ortholog of  Ceres SEQ ID NO 13545965 as cited in SEQ ID NO 67378

SEQ ID NO: 109897 - protein, 148 aa, Arabidopsis thaliana; identical to SEQ ID NO: 98183
  peptide (1)..(148): Ceres Seq. ID no. 13601224

SEQ ID NO: 109898 - protein, 119 aa, Arabidopsis thaliana; identical to SEQ ID NO: 98184
  peptide (1)..(119): Ceres Seq. ID no. 13601225

SEQ ID NO: 109899 - protein, 111 aa, Arabidopsis thaliana; identical to SEQ ID NO: 98185
  peptide (1)..(111): Ceres Seq. ID no. 13601226

SEQ ID NO: 109900 - DNA, 2271 bp, Arabidopsis thaliana; identical to SEQ ID NO: 98661
  misc_feature (1)..(2271): Ceres Seq. ID no. 13601247
  misc_feature (1)..(2271): Ortholog of  Ceres SEQ ID NO 13590691 as cited in SEQ ID NO 66290

SEQ ID NO: 109901 - protein, 610 aa, Arabidopsis thaliana; identical to SEQ ID NO: 97587
  peptide (1)..(610): Ceres Seq. ID no. 13601248

SEQ ID NO: 109902 - protein, 446 aa, Arabidopsis thaliana; identical to SEQ ID NO: 97588
  peptide (1)..(446): Ceres Seq. ID no. 13601249

SEQ ID NO: 109903 - protein, 395 aa, Arabidopsis thaliana; identical to SEQ ID NO: 97589
  peptide (1)..(395): Ceres Seq. ID no. 13601250

SEQ ID NO: 109904 - DNA, 1588 bp, Arabidopsis thaliana; identical to SEQ ID NO: 98665
  misc_feature (1)..(1588): Ceres Seq. ID no. 13601255
  misc_feature (1)..(1588): Ortholog of  Ceres SEQ ID NO 13596816 as cited in SEQ ID NO 62287

SEQ ID NO: 109905 - protein, 434 aa, Arabidopsis thaliana; identical to SEQ ID NO: 28815
  peptide (1)..(434): Ceres Seq. ID no. 13601256

SEQ ID NO: 109906 - protein, 425 aa, Arabidopsis thaliana; identical to SEQ ID NO: 28816
  peptide (1)..(425): Ceres Seq. ID no. 13601257

SEQ ID NO: 109907 - protein, 338 aa, Arabidopsis thaliana; identical to SEQ ID NO: 28817
  peptide (1)..(338): Ceres Seq. ID no. 13601258

SEQ ID NO: 109908 - DNA, 786 bp, Arabidopsis thaliana; identical to SEQ ID NO: 98669
  misc_feature (1)..(786): Ceres Seq. ID no. 13601270
  misc_feature (1)..(786): Ortholog of  Ceres SEQ ID NO 14309220 as cited in SEQ ID NO 0

SEQ ID NO: 109909 - protein, 163 aa, Arabidopsis thaliana; identical to SEQ ID NO: 26881
  peptide (1)..(163): Ceres Seq. ID no. 13601271

SEQ ID NO: 109910 - protein, 136 aa, Arabidopsis thaliana; identical to SEQ ID NO: 26882
  peptide (1)..(136): Ceres Seq. ID no. 13601272

SEQ ID NO: 109911 - protein, 130 aa, Arabidopsis thaliana; identical to SEQ ID NO: 26883
  peptide (1)..(130): Ceres Seq. ID no. 13601273

SEQ ID NO: 109912 - DNA, 1352 bp, Arabidopsis thaliana; identical to SEQ ID NO: 98673
  misc_feature (1)..(1352): Ceres Seq. ID no. 13601278
  misc_feature (1)..(1352): Ortholog of  Ceres SEQ ID NO 13596581 as cited in SEQ ID NO 62420
  misc_feature (1)..(1352): Ortholog of  Ceres SEQ ID NO 13591273 as cited in SEQ ID NO 65904
  misc_feature (1)..(1352): Ortholog of  Ceres SEQ ID NO 13623086 as cited in SEQ ID NO 0

SEQ ID NO: 109913 - protein, 405 aa, Arabidopsis thaliana; identical to SEQ ID NO: 35100
  peptide (1)..(405): Ceres Seq. ID no. 13601279

SEQ ID NO: 109914 - protein, 390 aa, Arabidopsis thaliana; identical to SEQ ID NO: 35101
  peptide (1)..(390): Ceres Seq. ID no. 13601280

SEQ ID NO: 109915 - protein, 358 aa, Arabidopsis thaliana; identical to SEQ ID NO: 35102
  peptide (1)..(358): Ceres Seq. ID no. 13601281

SEQ ID NO: 109916 - DNA, 1351 bp, Arabidopsis thaliana; identical to SEQ ID NO: 98677
  misc_feature (1)..(1351): Ceres Seq. ID no. 13601282
  misc_feature (1)..(1351): Ortholog of  Ceres SEQ ID NO 13584616 as cited in SEQ ID NO 65234

SEQ ID NO: 109917 - protein, 421 aa, Arabidopsis thaliana; identical to SEQ ID NO: 98678
  peptide (1)..(421): Ceres Seq. ID no. 13601283

SEQ ID NO: 109918 - protein, 419 aa, Arabidopsis thaliana; identical to SEQ ID NO: 98679
  peptide (1)..(419): Ceres Seq. ID no. 13601284

SEQ ID NO: 109919 - protein, 418 aa, Arabidopsis thaliana; identical to SEQ ID NO: 98680
  peptide (1)..(418): Ceres Seq. ID no. 13601285

SEQ ID NO: 109920 - DNA, 1020 bp, Arabidopsis thaliana; identical to SEQ ID NO: 98681
  misc_feature (1)..(1020): Ceres Seq. ID no. 13601286
  misc_feature (1)..(1020): Ortholog of  Ceres SEQ ID NO 15176185 as cited in SEQ ID NO 1082

SEQ ID NO: 109921 - protein, 305 aa, Arabidopsis thaliana; identical to SEQ ID NO: 98682
  peptide (1)..(305): Ceres Seq. ID no. 13601287

SEQ ID NO: 109922 - protein, 299 aa, Arabidopsis thaliana; identical to SEQ ID NO: 35921
  peptide (1)..(299): Ceres Seq. ID no. 13601288

SEQ ID NO: 109923 - protein, 221 aa, Arabidopsis thaliana; identical to SEQ ID NO: 35922
  peptide (1)..(221): Ceres Seq. ID no. 13601289

SEQ ID NO: 109924 - DNA, 1680 bp, Arabidopsis thaliana; identical to SEQ ID NO: 98685
  misc_feature (1)..(1680): Ceres Seq. ID no. 13601290
  misc_feature (1)..(1680): Ortholog of  Ceres SEQ ID NO 13657915 as cited in SEQ ID NO 66051

SEQ ID NO: 109925 - protein, 447 aa, Arabidopsis thaliana; identical to SEQ ID NO: 98686
  peptide (1)..(447): Ceres Seq. ID no. 13601291

SEQ ID NO: 109926 - protein, 345 aa, Arabidopsis thaliana; identical to SEQ ID NO: 98687
  peptide (1)..(345): Ceres Seq. ID no. 13601292

SEQ ID NO: 109927 - protein, 282 aa, Arabidopsis thaliana; identical to SEQ ID NO: 98688
  peptide (1)..(282): Ceres Seq. ID no. 13601293

SEQ ID NO: 109928 - DNA, 1205 bp, Arabidopsis thaliana; identical to SEQ ID NO: 98689
  misc_feature (1)..(1205): Ceres Seq. ID no. 13601294
  misc_feature (1)..(1205): Ortholog of  Ceres SEQ ID NO 14311596 as cited in SEQ ID NO 51728
  misc_feature (1)..(1205): Ortholog of  Ceres SEQ ID NO 15177031 as cited in SEQ ID NO 60171
  misc_feature (1)..(1205): Ortholog of  Ceres SEQ ID NO 12617197 as cited in SEQ ID NO 63406
  misc_feature (1)..(1205): Ortholog of  Ceres SEQ ID NO 13597804 as cited in SEQ ID NO 64182
  misc_feature (1)..(1205): Ortholog of  Ceres SEQ ID NO 15179788 as cited in SEQ ID NO 64818
  misc_feature (1)..(1205): Ortholog of  Ceres SEQ ID NO 14302768 as cited in SEQ ID NO 64889
  misc_feature (1)..(1205): Ortholog of  Ceres SEQ ID NO 13598565 as cited in SEQ ID NO 65250
  misc_feature (1)..(1205): Ortholog of  Ceres SEQ ID NO 13598597 as cited in SEQ ID NO 65496
  misc_feature (1)..(1205): Ortholog of  Ceres SEQ ID NO 13596284 as cited in SEQ ID NO 68273
  misc_feature (1)..(1205): Ortholog of  Ceres SEQ ID NO 15178902 as cited in SEQ ID NO 0

SEQ ID NO: 109929 - protein, 326 aa, Arabidopsis thaliana; identical to SEQ ID NO: 98690
  peptide (1)..(326): Ceres Seq. ID no. 13601295

SEQ ID NO: 109930 - protein, 196 aa, Arabidopsis thaliana; identical to SEQ ID NO: 98691
  peptide (1)..(196): Ceres Seq. ID no. 13601296

SEQ ID NO: 109931 - protein, 164 aa, Arabidopsis thaliana; identical to SEQ ID NO: 98692
  peptide (1)..(164): Ceres Seq. ID no. 13601297

SEQ ID NO: 109932 - DNA, 1382 bp, Arabidopsis thaliana; identical to SEQ ID NO: 98693
  misc_feature (1)..(1382): Ceres Seq. ID no. 13601305
  misc_feature (1)..(1382): Ortholog of  Ceres SEQ ID NO 13597747 as cited in SEQ ID NO 69071

SEQ ID NO: 109933 - protein, 328 aa, Arabidopsis thaliana; identical to SEQ ID NO: 98694
  peptide (1)..(328): Ceres Seq. ID no. 13601306

SEQ ID NO: 109934 - protein, 181 aa, Arabidopsis thaliana; identical to SEQ ID NO: 98695
  peptide (1)..(181): Ceres Seq. ID no. 13601307

SEQ ID NO: 109935 - DNA, 1166 bp, Arabidopsis thaliana; identical to SEQ ID NO: 98696
  misc_feature (1)..(1166): Ceres Seq. ID no. 13601308
  misc_feature (1)..(1166): Ortholog of  Ceres SEQ ID NO 14302761 as cited in SEQ ID NO 65542

SEQ ID NO: 109936 - protein, 288 aa, Arabidopsis thaliana; identical to SEQ ID NO: 98697
  peptide (1)..(288): Ceres Seq. ID no. 13601309

SEQ ID NO: 109937 - DNA, 1688 bp, Arabidopsis thaliana; identical to SEQ ID NO: 98698
  misc_feature (1)..(1688): Ceres Seq. ID no. 13601310
  misc_feature (1)..(1688): Ortholog of  Ceres SEQ ID NO 14307863 as cited in SEQ ID NO 20504

SEQ ID NO: 109938 - protein, 450 aa, Arabidopsis thaliana; identical to SEQ ID NO: 38746
  peptide (1)..(450): Ceres Seq. ID no. 13601311

SEQ ID NO: 109939 - protein, 416 aa, Arabidopsis thaliana; identical to SEQ ID NO: 38747
  peptide (1)..(416): Ceres Seq. ID no. 13601312

SEQ ID NO: 109940 - protein, 415 aa, Arabidopsis thaliana; identical to SEQ ID NO: 38748
  peptide (1)..(415): Ceres Seq. ID no. 13601313

SEQ ID NO: 109941 - DNA, 1285 bp, Arabidopsis thaliana; identical to SEQ ID NO: 98702
  misc_feature (1)..(1285): Ceres Seq. ID no. 13601322
  misc_feature (1)..(1285): Ortholog of  Ceres SEQ ID NO 15172792 as cited in SEQ ID NO 52134
  misc_feature (1)..(1285): Ortholog of  Ceres SEQ ID NO 13502622 as cited in SEQ ID NO 56443
  misc_feature (1)..(1285): Ortholog of  Ceres SEQ ID NO 12624901 as cited in SEQ ID NO 62597

SEQ ID NO: 109942 - protein, 328 aa, Arabidopsis thaliana; identical to SEQ ID NO: 22461
  peptide (1)..(328): Ceres Seq. ID no. 13601323

SEQ ID NO: 109943 - protein, 170 aa, Arabidopsis thaliana; identical to SEQ ID NO: 22462
  peptide (1)..(170): Ceres Seq. ID no. 13601324

SEQ ID NO: 109944 - DNA, 1086 bp, Arabidopsis thaliana; identical to SEQ ID NO: 98705
  misc_feature (1)..(1086): Ceres Seq. ID no. 13601332
  misc_feature (1)..(1086): Ortholog of  Ceres SEQ ID NO 15224625 as cited in SEQ ID NO 1390
  misc_feature (1)..(1086): Ortholog of  Ceres SEQ ID NO 13581868 as cited in SEQ ID NO 52227
  misc_feature (1)..(1086): Ortholog of  Ceres SEQ ID NO 14306339 as cited in SEQ ID NO 0

SEQ ID NO: 109945 - protein, 275 aa, Arabidopsis thaliana; identical to SEQ ID NO: 22207
  peptide (1)..(275): Ceres Seq. ID no. 13601333

SEQ ID NO: 109946 - protein, 256 aa, Arabidopsis thaliana; identical to SEQ ID NO: 22208
  peptide (1)..(256): Ceres Seq. ID no. 13601334

SEQ ID NO: 109947 - protein, 154 aa, Arabidopsis thaliana; identical to SEQ ID NO: 22209
  peptide (1)..(154): Ceres Seq. ID no. 13601335

SEQ ID NO: 109948 - DNA, 1187 bp, Arabidopsis thaliana; identical to SEQ ID NO: 98709
  misc_feature (1)..(1187): Ceres Seq. ID no. 13601348
  misc_feature (1)..(1187): Ortholog of  Ceres SEQ ID NO 12636774 as cited in SEQ ID NO 372
  misc_feature (1)..(1187): Ortholog of  Ceres SEQ ID NO 12582113 as cited in SEQ ID NO 58349
  misc_feature (1)..(1187): Ortholog of  Ceres SEQ ID NO 12615466 as cited in SEQ ID NO 62761
  misc_feature (1)..(1187): Ortholog of  Ceres SEQ ID NO 14314080 as cited in SEQ ID NO 63105
  misc_feature (1)..(1187): Ortholog of  Ceres SEQ ID NO 13597295 as cited in SEQ ID NO 63743
  misc_feature (1)..(1187): Ortholog of  Ceres SEQ ID NO 12617090 as cited in SEQ ID NO 64005
  misc_feature (1)..(1187): Ortholog of  Ceres SEQ ID NO 13597439 as cited in SEQ ID NO 64081
  misc_feature (1)..(1187): Ortholog of  Ceres SEQ ID NO 13597233 as cited in SEQ ID NO 64370
  misc_feature (1)..(1187): Ortholog of  Ceres SEQ ID NO 13598327 as cited in SEQ ID NO 68040
  misc_feature (1)..(1187): Ortholog of  Ceres SEQ ID NO 13599438 as cited in SEQ ID NO 0

SEQ ID NO: 109949 - protein, 353 aa, Arabidopsis thaliana; identical to SEQ ID NO: 98710
  peptide (1)..(353): Ceres Seq. ID no. 13601349

SEQ ID NO: 109950 - protein, 348 aa, Arabidopsis thaliana; identical to SEQ ID NO: 24459
  peptide (1)..(348): Ceres Seq. ID no. 13601350

SEQ ID NO: 109951 - protein, 306 aa, Arabidopsis thaliana; identical to SEQ ID NO: 24460
  peptide (1)..(306): Ceres Seq. ID no. 13601351

SEQ ID NO: 109952 - DNA, 1750 bp, Arabidopsis thaliana; identical to SEQ ID NO: 98713
  misc_feature (1)..(1750): Ceres Seq. ID no. 13601356
  misc_feature (1)..(1750): Ortholog of  Ceres SEQ ID NO 13659033 as cited in SEQ ID NO 66372
  misc_feature (1)..(1750): Ortholog of  Ceres SEQ ID NO 13655724 as cited in SEQ ID NO 68973
  misc_feature (1)..(1750): Ortholog of  Ceres SEQ ID NO 12625899 as cited in SEQ ID NO 69079
  misc_feature (1)..(1750): Ortholog of  Ceres SEQ ID NO 15180366 as cited in SEQ ID NO 0

SEQ ID NO: 109953 - protein, 485 aa, Arabidopsis thaliana; identical to SEQ ID NO: 98714
  peptide (1)..(485): Ceres Seq. ID no. 13601357

SEQ ID NO: 109954 - protein, 348 aa, Arabidopsis thaliana; identical to SEQ ID NO: 98715
  peptide (1)..(348): Ceres Seq. ID no. 13601358

SEQ ID NO: 109955 - protein, 274 aa, Arabidopsis thaliana; identical to SEQ ID NO: 35406
  peptide (1)..(274): Ceres Seq. ID no. 13601359

SEQ ID NO: 109956 - DNA, 781 bp, Arabidopsis thaliana; identical to SEQ ID NO: 98717
  misc_feature (1)..(781): Ceres Seq. ID no. 13601366
  misc_feature (1)..(781): Ortholog of  Ceres SEQ ID NO 12474478 as cited in SEQ ID NO 96
  misc_feature (1)..(781): Ortholog of  Ceres SEQ ID NO 14302025 as cited in SEQ ID NO 52138
  misc_feature (1)..(781): Ortholog of  Ceres SEQ ID NO 15172672 as cited in SEQ ID NO 53908

SEQ ID NO: 109957 - protein, 221 aa, Arabidopsis thaliana; identical to SEQ ID NO: 26084
  peptide (1)..(221): Ceres Seq. ID no. 13601367

SEQ ID NO: 109958 - protein, 205 aa, Arabidopsis thaliana; identical to SEQ ID NO: 26085
  peptide (1)..(205): Ceres Seq. ID no. 13601368

SEQ ID NO: 109959 - DNA, 1974 bp, Arabidopsis thaliana; identical to SEQ ID NO: 98720
  misc_feature (1)..(1974): Ceres Seq. ID no. 13601380
  misc_feature (1)..(1974): Ortholog of  Ceres SEQ ID NO 14310841 as cited in SEQ ID NO 53666
  misc_feature (1)..(1974): Ortholog of  Ceres SEQ ID NO 15178736 as cited in SEQ ID NO 56439
  misc_feature (1)..(1974): Ortholog of  Ceres SEQ ID NO 14308493 as cited in SEQ ID NO 60320

SEQ ID NO: 109960 - protein, 527 aa, Arabidopsis thaliana; identical to SEQ ID NO: 29071
  peptide (1)..(527): Ceres Seq. ID no. 13601381

SEQ ID NO: 109961 - protein, 507 aa, Arabidopsis thaliana; identical to SEQ ID NO: 29072
  peptide (1)..(507): Ceres Seq. ID no. 13601382

SEQ ID NO: 109962 - protein, 500 aa, Arabidopsis thaliana; identical to SEQ ID NO: 29073
  peptide (1)..(500): Ceres Seq. ID no. 13601383

SEQ ID NO: 109963 - DNA, 1774 bp, Arabidopsis thaliana; identical to SEQ ID NO: 98724
  misc_feature (1)..(1774): Ceres Seq. ID no. 13601391
  misc_feature (1)..(1774): Ortholog of  Ceres SEQ ID NO 13663328 as cited in SEQ ID NO 66678
  misc_feature (1)..(1774): Ortholog of  Ceres SEQ ID NO 13624495 as cited in SEQ ID NO 0

SEQ ID NO: 109964 - protein, 517 aa, Arabidopsis thaliana; identical to SEQ ID NO: 98725
  peptide (1)..(517): Ceres Seq. ID no. 13601392

SEQ ID NO: 109965 - protein, 502 aa, Arabidopsis thaliana; identical to SEQ ID NO: 70514
  peptide (1)..(502): Ceres Seq. ID no. 13601393

SEQ ID NO: 109966 - protein, 474 aa, Arabidopsis thaliana; identical to SEQ ID NO: 70515
  peptide (1)..(474): Ceres Seq. ID no. 13601394

SEQ ID NO: 109967 - DNA, 878 bp, Arabidopsis thaliana; identical to SEQ ID NO: 98728
  misc_feature (1)..(878): Ceres Seq. ID no. 13601399
  misc_feature (1)..(878): Ortholog of  Ceres SEQ ID NO 13638567 as cited in SEQ ID NO 51303
  misc_feature (1)..(878): Ortholog of  Ceres SEQ ID NO 14301396 as cited in SEQ ID NO 51789
  misc_feature (1)..(878): Ortholog of  Ceres SEQ ID NO 12610031 as cited in SEQ ID NO 55811
  misc_feature (1)..(878): Ortholog of  Ceres SEQ ID NO 12610896 as cited in SEQ ID NO 55861
  misc_feature (1)..(878): Ortholog of  Ceres SEQ ID NO 12619664 as cited in SEQ ID NO 66048
  misc_feature (1)..(878): Ortholog of  Ceres SEQ ID NO 12635952 as cited in SEQ ID NO 0

SEQ ID NO: 109968 - protein, 215 aa, Arabidopsis thaliana; identical to SEQ ID NO: 21525
  peptide (1)..(215): Ceres Seq. ID no. 13601400

SEQ ID NO: 109969 - protein, 181 aa, Arabidopsis thaliana; identical to SEQ ID NO: 21526
  peptide (1)..(181): Ceres Seq. ID no. 13601401

SEQ ID NO: 109970 - protein, 146 aa, Arabidopsis thaliana; identical to SEQ ID NO: 21527
  peptide (1)..(146): Ceres Seq. ID no. 13601402

SEQ ID NO: 109971 - DNA, 1182 bp, Arabidopsis thaliana; identical to SEQ ID NO: 98732
  misc_feature (1)..(1182): Ceres Seq. ID no. 13601410
  misc_feature (1)..(1182): Ortholog of  Ceres SEQ ID NO 14310701 as cited in SEQ ID NO 53113
  misc_feature (1)..(1182): Ortholog of  Ceres SEQ ID NO 14303079 as cited in SEQ ID NO 67486

SEQ ID NO: 109972 - protein, 368 aa, Arabidopsis thaliana; identical to SEQ ID NO: 22994
  peptide (1)..(368): Ceres Seq. ID no. 13601411

SEQ ID NO: 109973 - protein, 350 aa, Arabidopsis thaliana; identical to SEQ ID NO: 22995
  peptide (1)..(350): Ceres Seq. ID no. 13601412

SEQ ID NO: 109974 - protein, 269 aa, Arabidopsis thaliana; identical to SEQ ID NO: 22996
  peptide (1)..(269): Ceres Seq. ID no. 13601413

SEQ ID NO: 109975 - DNA, 1237 bp, Arabidopsis thaliana; identical to SEQ ID NO: 98736
  misc_feature (1)..(1237): Ceres Seq. ID no. 13601414
  misc_feature (1)..(1237): Ortholog of  Ceres SEQ ID NO 15177935 as cited in SEQ ID NO 60258
  misc_feature (1)..(1237): Ortholog of  Ceres SEQ ID NO 13659033 as cited in SEQ ID NO 66372
  misc_feature (1)..(1237): Ortholog of  Ceres SEQ ID NO 12625899 as cited in SEQ ID NO 69079
  misc_feature (1)..(1237): Ortholog of  Ceres SEQ ID NO 15180051 as cited in SEQ ID NO 0

SEQ ID NO: 109976 - protein, 371 aa, Arabidopsis thaliana; identical to SEQ ID NO: 98737
  peptide (1)..(371): Ceres Seq. ID no. 13601415

SEQ ID NO: 109977 - protein, 364 aa, Arabidopsis thaliana; identical to SEQ ID NO: 98738
  peptide (1)..(364): Ceres Seq. ID no. 13601416

SEQ ID NO: 109978 - protein, 259 aa, Arabidopsis thaliana; identical to SEQ ID NO: 23519
  peptide (1)..(259): Ceres Seq. ID no. 13601417

SEQ ID NO: 109979 - DNA, 2216 bp, Arabidopsis thaliana; identical to SEQ ID NO: 98740
  misc_feature (1)..(2216): Ceres Seq. ID no. 13601436
  misc_feature (1)..(2216): Ortholog of  Ceres SEQ ID NO 13596509 as cited in SEQ ID NO 62004
  misc_feature (1)..(2216): Ortholog of  Ceres SEQ ID NO 13659971 as cited in SEQ ID NO 67565
  misc_feature (1)..(2216): Ortholog of  Ceres SEQ ID NO 13500385 as cited in SEQ ID NO 67583

SEQ ID NO: 109980 - protein, 582 aa, Arabidopsis thaliana; identical to SEQ ID NO: 98741
  peptide (1)..(582): Ceres Seq. ID no. 13601437

SEQ ID NO: 109981 - protein, 465 aa, Arabidopsis thaliana; identical to SEQ ID NO: 98742
  peptide (1)..(465): Ceres Seq. ID no. 13601438

SEQ ID NO: 109982 - protein, 439 aa, Arabidopsis thaliana; identical to SEQ ID NO: 98743
  peptide (1)..(439): Ceres Seq. ID no. 13601439

SEQ ID NO: 109983 - DNA, 1199 bp, Arabidopsis thaliana; identical to SEQ ID NO: 98744
  misc_feature (1)..(1199): Ceres Seq. ID no. 13601440
  misc_feature (1)..(1199): Ortholog of  Ceres SEQ ID NO 13593955 as cited in SEQ ID NO 54278
  misc_feature (1)..(1199): Ortholog of  Ceres SEQ ID NO 13597380 as cited in SEQ ID NO 64054
  misc_feature (1)..(1199): Ortholog of  Ceres SEQ ID NO 12625474 as cited in SEQ ID NO 64169
  misc_feature (1)..(1199): Ortholog of  Ceres SEQ ID NO 13597502 as cited in SEQ ID NO 64681

SEQ ID NO: 109984 - protein, 366 aa, Arabidopsis thaliana; identical to SEQ ID NO: 98745
  peptide (1)..(366): Ceres Seq. ID no. 13601441

SEQ ID NO: 109985 - protein, 360 aa, Arabidopsis thaliana; identical to SEQ ID NO: 98746
  peptide (1)..(360): Ceres Seq. ID no. 13601442

SEQ ID NO: 109986 - protein, 295 aa, Arabidopsis thaliana; identical to SEQ ID NO: 98747
  peptide (1)..(295): Ceres Seq. ID no. 13601443

SEQ ID NO: 109987 - DNA, 611 bp, Arabidopsis thaliana; identical to SEQ ID NO: 98748
  misc_feature (1)..(611): Ceres Seq. ID no. 13601448
  misc_feature (1)..(611): Ortholog of  Ceres SEQ ID NO 13598758 as cited in SEQ ID NO 61555

SEQ ID NO: 109988 - protein, 149 aa, Arabidopsis thaliana; identical to SEQ ID NO: 35790
  peptide (1)..(149): Ceres Seq. ID no. 13601449

SEQ ID NO: 109989 - DNA, 1602 bp, Arabidopsis thaliana; identical to SEQ ID NO: 98750
  misc_feature (1)..(1602): Ceres Seq. ID no. 13601450
  misc_feature (1)..(1602): Ortholog of  Ceres SEQ ID NO 13594345 as cited in SEQ ID NO 58043
  misc_feature (1)..(1602): Ortholog of  Ceres SEQ ID NO 12614112 as cited in SEQ ID NO 60891
  misc_feature (1)..(1602): Ortholog of  Ceres SEQ ID NO 13597574 as cited in SEQ ID NO 64677
  misc_feature (1)..(1602): Ortholog of  Ceres SEQ ID NO 14302832 as cited in SEQ ID NO 64926
  misc_feature (1)..(1602): Ortholog of  Ceres SEQ ID NO 13662880 as cited in SEQ ID NO 65422
  misc_feature (1)..(1602): Ortholog of  Ceres SEQ ID NO 12779098 as cited in SEQ ID NO 67698
  misc_feature (1)..(1602): Ortholog of  Ceres SEQ ID NO 13596180 as cited in SEQ ID NO 67941
  misc_feature (1)..(1602): Ortholog of  Ceres SEQ ID NO 13591190 as cited in SEQ ID NO 68044
  misc_feature (1)..(1602): Ortholog of  Ceres SEQ ID NO 13596089 as cited in SEQ ID NO 68373
  misc_feature (1)..(1602): Ortholog of  Ceres SEQ ID NO 14313563 as cited in SEQ ID NO 68700

SEQ ID NO: 109990 - protein, 456 aa, Arabidopsis thaliana; identical to SEQ ID NO: 40585
  peptide (1)..(456): Ceres Seq. ID no. 13601451

SEQ ID NO: 109991 - protein, 353 aa, Arabidopsis thaliana; identical to SEQ ID NO: 40586
  peptide (1)..(353): Ceres Seq. ID no. 13601452

SEQ ID NO: 109992 - protein, 291 aa, Arabidopsis thaliana; identical to SEQ ID NO: 40587
  peptide (1)..(291): Ceres Seq. ID no. 13601453

SEQ ID NO: 109993 - DNA, 1421 bp, Arabidopsis thaliana; identical to SEQ ID NO: 98754
  misc_feature (1)..(1421): Ceres Seq. ID no. 13601454
  misc_feature (1)..(1421): Ortholog of  Ceres SEQ ID NO 14314300 as cited in SEQ ID NO 57386
  misc_feature (1)..(1421): Ortholog of  Ceres SEQ ID NO 14311993 as cited in SEQ ID NO 60371
  misc_feature (1)..(1421): Ortholog of  Ceres SEQ ID NO 13596509 as cited in SEQ ID NO 62004
  misc_feature (1)..(1421): Ortholog of  Ceres SEQ ID NO 13659971 as cited in SEQ ID NO 67565
  misc_feature (1)..(1421): Ortholog of  Ceres SEQ ID NO 13500385 as cited in SEQ ID NO 67583

SEQ ID NO: 109994 - protein, 360 aa, Arabidopsis thaliana; identical to SEQ ID NO: 98755
  peptide (1)..(360): Ceres Seq. ID no. 13601455

SEQ ID NO: 109995 - protein, 329 aa, Arabidopsis thaliana; identical to SEQ ID NO: 98756
  peptide (1)..(329): Ceres Seq. ID no. 13601456

SEQ ID NO: 109996 - protein, 284 aa, Arabidopsis thaliana; identical to SEQ ID NO: 98757
  peptide (1)..(284): Ceres Seq. ID no. 13601457

SEQ ID NO: 109997 - DNA, 1680 bp, Arabidopsis thaliana; identical to SEQ ID NO: 98758
  misc_feature (1)..(1680): Ceres Seq. ID no. 13601458
  misc_feature (1)..(1680): Ortholog of  Ceres SEQ ID NO 13596216 as cited in SEQ ID NO 68515

SEQ ID NO: 109998 - protein, 367 aa, Arabidopsis thaliana; identical to SEQ ID NO: 98759
  peptide (1)..(367): Ceres Seq. ID no. 13601459

SEQ ID NO: 109999 - protein, 243 aa, Arabidopsis thaliana; identical to SEQ ID NO: 98760
  peptide (1)..(243): Ceres Seq. ID no. 13601460

SEQ ID NO: 110000 - DNA, 1801 bp, Arabidopsis thaliana; identical to SEQ ID NO: 98761
  misc_feature (1)..(1801): Ceres Seq. ID no. 13601461
  misc_feature (1)..(1801): Ortholog of  Ceres SEQ ID NO 12625335 as cited in SEQ ID NO 63326

SEQ ID NO: 110001 - protein, 440 aa, Arabidopsis thaliana; identical to SEQ ID NO: 98159
  peptide (1)..(440): Ceres Seq. ID no. 13601462

SEQ ID NO: 110002 - protein, 436 aa, Arabidopsis thaliana; identical to SEQ ID NO: 98160
  peptide (1)..(436): Ceres Seq. ID no. 13601463

SEQ ID NO: 110003 - protein, 354 aa, Arabidopsis thaliana; identical to SEQ ID NO: 98161
  peptide (1)..(354): Ceres Seq. ID no. 13601464

SEQ ID NO: 110004 - DNA, 493 bp, Arabidopsis thaliana; identical to SEQ ID NO: 98765
  misc_feature (1)..(493): Ceres Seq. ID no. 13601467
  misc_feature (1)..(493): Ortholog of  Ceres SEQ ID NO 12337178 as cited in SEQ ID NO 20526

SEQ ID NO: 110005 - protein, 102 aa, Arabidopsis thaliana; identical to SEQ ID NO: 98766
  peptide (1)..(102): Ceres Seq. ID no. 13601468

SEQ ID NO: 110006 - protein, 76 aa, Arabidopsis thaliana; identical to SEQ ID NO: 23164
  peptide (1)..(76): Ceres Seq. ID no. 13601469

SEQ ID NO: 110007 - DNA, 1251 bp, Arabidopsis thaliana; identical to SEQ ID NO: 98768
  misc_feature (1)..(1251): Ceres Seq. ID no. 13601474
  misc_feature (1)..(1251): Ortholog of  Ceres SEQ ID NO 15178181 as cited in SEQ ID NO 58740
  misc_feature (1)..(1251): Ortholog of  Ceres SEQ ID NO 12614739 as cited in SEQ ID NO 68587

SEQ ID NO: 110008 - protein, 369 aa, Arabidopsis thaliana; identical to SEQ ID NO: 38592
  peptide (1)..(369): Ceres Seq. ID no. 13601475

SEQ ID NO: 110009 - protein, 357 aa, Arabidopsis thaliana; identical to SEQ ID NO: 38593
  peptide (1)..(357): Ceres Seq. ID no. 13601476

SEQ ID NO: 110010 - protein, 352 aa, Arabidopsis thaliana; identical to SEQ ID NO: 38594
  peptide (1)..(352): Ceres Seq. ID no. 13601477

SEQ ID NO: 110011 - DNA, 845 bp, Arabidopsis thaliana; identical to SEQ ID NO: 98772
  misc_feature (1)..(845): Ceres Seq. ID no. 13601478
  misc_feature (1)..(845): Ortholog of  Ceres SEQ ID NO 13638893 as cited in SEQ ID NO 55835
  misc_feature (1)..(845): Ortholog of  Ceres SEQ ID NO 13661656 as cited in SEQ ID NO 61607
  misc_feature (1)..(845): Ortholog of  Ceres SEQ ID NO 14309331 as cited in SEQ ID NO 0

SEQ ID NO: 110012 - protein, 182 aa, Arabidopsis thaliana; identical to SEQ ID NO: 38534
  peptide (1)..(182): Ceres Seq. ID no. 13601479

SEQ ID NO: 110013 - protein, 133 aa, Arabidopsis thaliana; identical to SEQ ID NO: 38535
  peptide (1)..(133): Ceres Seq. ID no. 13601480

SEQ ID NO: 110014 - DNA, 1234 bp, Arabidopsis thaliana; identical to SEQ ID NO: 98775
  misc_feature (1)..(1234): Ceres Seq. ID no. 13601481
  misc_feature (1)..(1234): Ortholog of  Ceres SEQ ID NO 13598714 as cited in SEQ ID NO 62656
  misc_feature (1)..(1234): Ortholog of  Ceres SEQ ID NO 13597519 as cited in SEQ ID NO 64759
  misc_feature (1)..(1234): Ortholog of  Ceres SEQ ID NO 13597870 as cited in SEQ ID NO 64982
  misc_feature (1)..(1234): Ortholog of  Ceres SEQ ID NO 13656123 as cited in SEQ ID NO 65212
  misc_feature (1)..(1234): Ortholog of  Ceres SEQ ID NO 13595926 as cited in SEQ ID NO 67778

SEQ ID NO: 110015 - protein, 331 aa, Arabidopsis thaliana; identical to SEQ ID NO: 26687
  peptide (1)..(331): Ceres Seq. ID no. 13601482

SEQ ID NO: 110016 - protein, 258 aa, Arabidopsis thaliana; identical to SEQ ID NO: 26688
  peptide (1)..(258): Ceres Seq. ID no. 13601483

SEQ ID NO: 110017 - DNA, 648 bp, Arabidopsis thaliana; identical to SEQ ID NO: 98778
  misc_feature (1)..(648): Ceres Seq. ID no. 13601491
  misc_feature (1)..(648): Ortholog of  Ceres SEQ ID NO 12635845 as cited in SEQ ID NO 0

SEQ ID NO: 110018 - protein, 158 aa, Arabidopsis thaliana; identical to SEQ ID NO: 30138
  peptide (1)..(158): Ceres Seq. ID no. 13601492

SEQ ID NO: 110019 - protein, 137 aa, Arabidopsis thaliana; identical to SEQ ID NO: 30139
  peptide (1)..(137): Ceres Seq. ID no. 13601493

SEQ ID NO: 110020 - DNA, 647 bp, Arabidopsis thaliana; identical to SEQ ID NO: 98781
  misc_feature (1)..(647): Ceres Seq. ID no. 13601497
  misc_feature (1)..(647): Ortholog of  Ceres SEQ ID NO 12609890 as cited in SEQ ID NO 51792
  misc_feature (1)..(647): Ortholog of  Ceres SEQ ID NO 12597253 as cited in SEQ ID NO 62959
  misc_feature (1)..(647): Ortholog of  Ceres SEQ ID NO 15173341 as cited in SEQ ID NO 63800
  misc_feature (1)..(647): Ortholog of  Ceres SEQ ID NO 12635416 as cited in SEQ ID NO 0
  misc_feature (1)..(647): Ortholog of  Ceres SEQ ID NO 12635564 as cited in SEQ ID NO 0
  misc_feature (1)..(647): Ortholog of  Ceres SEQ ID NO 12636917 as cited in SEQ ID NO 0
  misc_feature (1)..(647): Ortholog of  Ceres SEQ ID NO 14309430 as cited in SEQ ID NO 0

SEQ ID NO: 110021 - protein, 150 aa, Arabidopsis thaliana; identical to SEQ ID NO: 31039
  peptide (1)..(150): Ceres Seq. ID no. 13601498

SEQ ID NO: 110022 - protein, 122 aa, Arabidopsis thaliana; identical to SEQ ID NO: 31040
  peptide (1)..(122): Ceres Seq. ID no. 13601499

SEQ ID NO: 110023 - protein, 90 aa, Arabidopsis thaliana; identical to SEQ ID NO: 31041
  peptide (1)..(90): Ceres Seq. ID no. 13601500

SEQ ID NO: 110024 - DNA, 1119 bp, Arabidopsis thaliana; identical to SEQ ID NO: 98785
  misc_feature (1)..(1119): Ceres Seq. ID no. 13601501
  misc_feature (1)..(1119): Ortholog of  Ceres SEQ ID NO 13581848 as cited in SEQ ID NO 51340
  misc_feature (1)..(1119): Ortholog of  Ceres SEQ ID NO 13595392 as cited in SEQ ID NO 56164
  misc_feature (1)..(1119): Ortholog of  Ceres SEQ ID NO 14316412 as cited in SEQ ID NO 59209
  misc_feature (1)..(1119): Ortholog of  Ceres SEQ ID NO 12618341 as cited in SEQ ID NO 64256

SEQ ID NO: 110025 - protein, 297 aa, Arabidopsis thaliana; identical to SEQ ID NO: 98786
  peptide (1)..(297): Ceres Seq. ID no. 13601502

SEQ ID NO: 110026 - protein, 244 aa, Arabidopsis thaliana; identical to SEQ ID NO: 20888
  peptide (1)..(244): Ceres Seq. ID no. 13601503

SEQ ID NO: 110027 - protein, 238 aa, Arabidopsis thaliana; identical to SEQ ID NO: 20889
  peptide (1)..(238): Ceres Seq. ID no. 13601504

SEQ ID NO: 110028 - DNA, 976 bp, Arabidopsis thaliana; identical to SEQ ID NO: 98789
  misc_feature (1)..(976): Ceres Seq. ID no. 13601511
  misc_feature (1)..(976): Ortholog of  Ceres SEQ ID NO 15173410 as cited in SEQ ID NO 61812

SEQ ID NO: 110029 - protein, 261 aa, Arabidopsis thaliana; identical to SEQ ID NO: 98790
  peptide (1)..(261): Ceres Seq. ID no. 13601512

SEQ ID NO: 110030 - protein, 249 aa, Arabidopsis thaliana; identical to SEQ ID NO: 98791
  peptide (1)..(249): Ceres Seq. ID no. 13601513

SEQ ID NO: 110031 - DNA, 1100 bp, Arabidopsis thaliana; identical to SEQ ID NO: 98792
  misc_feature (1)..(1100): Ceres Seq. ID no. 13601514
  misc_feature (1)..(1100): Ortholog of  Ceres SEQ ID NO 14303471 as cited in SEQ ID NO 59423

SEQ ID NO: 110032 - protein, 272 aa, Arabidopsis thaliana; identical to SEQ ID NO: 98793
  peptide (1)..(272): Ceres Seq. ID no. 13601515

SEQ ID NO: 110033 - protein, 254 aa, Arabidopsis thaliana; identical to SEQ ID NO: 98794
  peptide (1)..(254): Ceres Seq. ID no. 13601516

SEQ ID NO: 110034 - protein, 251 aa, Arabidopsis thaliana; identical to SEQ ID NO: 98795
  peptide (1)..(251): Ceres Seq. ID no. 13601517

SEQ ID NO: 110035 - DNA, 1943 bp, Arabidopsis thaliana; identical to SEQ ID NO: 98796
  misc_feature (1)..(1943): Ceres Seq. ID no. 13601524
  misc_feature (1)..(1943): Ortholog of  Ceres SEQ ID NO 14302588 as cited in SEQ ID NO 0

SEQ ID NO: 110036 - protein, 602 aa, Arabidopsis thaliana; identical to SEQ ID NO: 98797
  peptide (1)..(602): Ceres Seq. ID no. 13601525

SEQ ID NO: 110037 - protein, 597 aa, Arabidopsis thaliana; identical to SEQ ID NO: 40245
  peptide (1)..(597): Ceres Seq. ID no. 13601526

SEQ ID NO: 110038 - protein, 525 aa, Arabidopsis thaliana; identical to SEQ ID NO: 40246
  peptide (1)..(525): Ceres Seq. ID no. 13601527

SEQ ID NO: 110039 - DNA, 2337 bp, Arabidopsis thaliana; identical to SEQ ID NO: 98800
  misc_feature (1)..(2337): Ceres Seq. ID no. 13601528
  misc_feature (1)..(2337): Ortholog of  Ceres SEQ ID NO 13623192 as cited in SEQ ID NO 1286
  misc_feature (1)..(2337): Ortholog of  Ceres SEQ ID NO 13594171 as cited in SEQ ID NO 60359
  misc_feature (1)..(2337): Ortholog of  Ceres SEQ ID NO 14301866 as cited in SEQ ID NO 60955
  misc_feature (1)..(2337): Ortholog of  Ceres SEQ ID NO 13590645 as cited in SEQ ID NO 62109

SEQ ID NO: 110040 - protein, 627 aa, Arabidopsis thaliana; identical to SEQ ID NO: 29543
  peptide (1)..(627): Ceres Seq. ID no. 13601529

SEQ ID NO: 110041 - protein, 595 aa, Arabidopsis thaliana; identical to SEQ ID NO: 29544
  peptide (1)..(595): Ceres Seq. ID no. 13601530

SEQ ID NO: 110042 - protein, 508 aa, Arabidopsis thaliana; identical to SEQ ID NO: 29545
  peptide (1)..(508): Ceres Seq. ID no. 13601531

SEQ ID NO: 110043 - DNA, 1175 bp, Arabidopsis thaliana; identical to SEQ ID NO: 98804
  misc_feature (1)..(1175): Ceres Seq. ID no. 13601532
  misc_feature (1)..(1175): Ortholog of  Ceres SEQ ID NO 13581804 as cited in SEQ ID NO 51424
  misc_feature (1)..(1175): Ortholog of  Ceres SEQ ID NO 14307797 as cited in SEQ ID NO 54802
  misc_feature (1)..(1175): Ortholog of  Ceres SEQ ID NO 15168374 as cited in SEQ ID NO 55652
  misc_feature (1)..(1175): Ortholog of  Ceres SEQ ID NO 13663874 as cited in SEQ ID NO 67003
  misc_feature (1)..(1175): Ortholog of  Ceres SEQ ID NO 13624654 as cited in SEQ ID NO 0

SEQ ID NO: 110044 - protein, 242 aa, Arabidopsis thaliana; identical to SEQ ID NO: 35943
  peptide (1)..(242): Ceres Seq. ID no. 13601533

SEQ ID NO: 110045 - protein, 180 aa, Arabidopsis thaliana; identical to SEQ ID NO: 35944
  peptide (1)..(180): Ceres Seq. ID no. 13601534

SEQ ID NO: 110046 - protein, 130 aa, Arabidopsis thaliana; identical to SEQ ID NO: 35945
  peptide (1)..(130): Ceres Seq. ID no. 13601535

SEQ ID NO: 110047 - DNA, 1765 bp, Arabidopsis thaliana; identical to SEQ ID NO: 98808
  misc_feature (1)..(1765): Ceres Seq. ID no. 13601536
  misc_feature (1)..(1765): Ortholog of  Ceres SEQ ID NO 15171245 as cited in SEQ ID NO 52264
  misc_feature (1)..(1765): Ortholog of  Ceres SEQ ID NO 14303576 as cited in SEQ ID NO 68428

SEQ ID NO: 110048 - protein, 456 aa, Arabidopsis thaliana; identical to SEQ ID NO: 30278
  peptide (1)..(456): Ceres Seq. ID no. 13601537

SEQ ID NO: 110049 - protein, 409 aa, Arabidopsis thaliana; identical to SEQ ID NO: 30279
  peptide (1)..(409): Ceres Seq. ID no. 13601538

SEQ ID NO: 110050 - protein, 404 aa, Arabidopsis thaliana; identical to SEQ ID NO: 30280
  peptide (1)..(404): Ceres Seq. ID no. 13601539

SEQ ID NO: 110051 - DNA, 1560 bp, Arabidopsis thaliana; identical to SEQ ID NO: 98812
  misc_feature (1)..(1560): Ceres Seq. ID no. 13601540
  misc_feature (1)..(1560): Ortholog of  Ceres SEQ ID NO 15176426 as cited in SEQ ID NO 53944

SEQ ID NO: 110052 - protein, 429 aa, Arabidopsis thaliana; identical to SEQ ID NO: 40879
  peptide (1)..(429): Ceres Seq. ID no. 13601541

SEQ ID NO: 110053 - protein, 385 aa, Arabidopsis thaliana; identical to SEQ ID NO: 40880
  peptide (1)..(385): Ceres Seq. ID no. 13601542

SEQ ID NO: 110054 - protein, 294 aa, Arabidopsis thaliana; identical to SEQ ID NO: 40881
  peptide (1)..(294): Ceres Seq. ID no. 13601543

SEQ ID NO: 110055 - DNA, 1721 bp, Arabidopsis thaliana; identical to SEQ ID NO: 98816
  misc_feature (1)..(1721): Ceres Seq. ID no. 13601544
  misc_feature (1)..(1721): Ortholog of  Ceres SEQ ID NO 14315028 as cited in SEQ ID NO 57989

SEQ ID NO: 110056 - protein, 528 aa, Arabidopsis thaliana; identical to SEQ ID NO: 98817
  peptide (1)..(528): Ceres Seq. ID no. 13601545

SEQ ID NO: 110057 - protein, 521 aa, Arabidopsis thaliana; identical to SEQ ID NO: 98818
  peptide (1)..(521): Ceres Seq. ID no. 13601546

SEQ ID NO: 110058 - protein, 360 aa, Arabidopsis thaliana; identical to SEQ ID NO: 98819
  peptide (1)..(360): Ceres Seq. ID no. 13601547

SEQ ID NO: 110059 - DNA, 1402 bp, Arabidopsis thaliana; identical to SEQ ID NO: 98820
  misc_feature (1)..(1402): Ceres Seq. ID no. 13601552
  misc_feature (1)..(1402): Ortholog of  Ceres SEQ ID NO 14309287 as cited in SEQ ID NO 0

SEQ ID NO: 110060 - protein, 419 aa, Arabidopsis thaliana; identical to SEQ ID NO: 98821
  peptide (1)..(419): Ceres Seq. ID no. 13601553

SEQ ID NO: 110061 - protein, 342 aa, Arabidopsis thaliana; identical to SEQ ID NO: 27920
  peptide (1)..(342): Ceres Seq. ID no. 13601554

SEQ ID NO: 110062 - protein, 321 aa, Arabidopsis thaliana; identical to SEQ ID NO: 27921
  peptide (1)..(321): Ceres Seq. ID no. 13601555

SEQ ID NO: 110063 - DNA, 1364 bp, Arabidopsis thaliana; identical to SEQ ID NO: 98824
  misc_feature (1)..(1364): Ceres Seq. ID no. 13601560
  misc_feature (1)..(1364): Ortholog of  Ceres SEQ ID NO 15177842 as cited in SEQ ID NO 51547
  misc_feature (1)..(1364): Ortholog of  Ceres SEQ ID NO 13594859 as cited in SEQ ID NO 51974
  misc_feature (1)..(1364): Ortholog of  Ceres SEQ ID NO 13597887 as cited in SEQ ID NO 64295

SEQ ID NO: 110064 - protein, 296 aa, Arabidopsis thaliana; identical to SEQ ID NO: 98825
  peptide (1)..(296): Ceres Seq. ID no. 13601561

SEQ ID NO: 110065 - protein, 285 aa, Arabidopsis thaliana; identical to SEQ ID NO: 98826
  peptide (1)..(285): Ceres Seq. ID no. 13601562

SEQ ID NO: 110066 - protein, 231 aa, Arabidopsis thaliana; identical to SEQ ID NO: 98827
  peptide (1)..(231): Ceres Seq. ID no. 13601563

SEQ ID NO: 110067 - DNA, 890 bp, Arabidopsis thaliana; identical to SEQ ID NO: 98828
  misc_feature (1)..(890): Ceres Seq. ID no. 13601564
  misc_feature (1)..(890): Ortholog of  Ceres SEQ ID NO 13595341 as cited in SEQ ID NO 56398
  misc_feature (1)..(890): Ortholog of  Ceres SEQ ID NO 15173764 as cited in SEQ ID NO 57550
  misc_feature (1)..(890): Ortholog of  Ceres SEQ ID NO 15227118 as cited in SEQ ID NO 59038
  misc_feature (1)..(890): Ortholog of  Ceres SEQ ID NO 13597299 as cited in SEQ ID NO 63785
  misc_feature (1)..(890): Ortholog of  Ceres SEQ ID NO 13663895 as cited in SEQ ID NO 66923

SEQ ID NO: 110068 - protein, 218 aa, Arabidopsis thaliana; identical to SEQ ID NO: 26068
  peptide (1)..(218): Ceres Seq. ID no. 13601565

SEQ ID NO: 110069 - protein, 206 aa, Arabidopsis thaliana; identical to SEQ ID NO: 26069
  peptide (1)..(206): Ceres Seq. ID no. 13601566

SEQ ID NO: 110070 - protein, 125 aa, Arabidopsis thaliana; identical to SEQ ID NO: 98831
  peptide (1)..(125): Ceres Seq. ID no. 13601567

SEQ ID NO: 110071 - DNA, 1708 bp, Arabidopsis thaliana; identical to SEQ ID NO: 98832
  misc_feature (1)..(1708): Ceres Seq. ID no. 13601576
  misc_feature (1)..(1708): Ortholog of  Ceres SEQ ID NO 13596816 as cited in SEQ ID NO 62287

SEQ ID NO: 110072 - protein, 438 aa, Arabidopsis thaliana; identical to SEQ ID NO: 39792
  peptide (1)..(438): Ceres Seq. ID no. 13601577

SEQ ID NO: 110073 - protein, 310 aa, Arabidopsis thaliana; identical to SEQ ID NO: 39793
  peptide (1)..(310): Ceres Seq. ID no. 13601578

SEQ ID NO: 110074 - protein, 303 aa, Arabidopsis thaliana; identical to SEQ ID NO: 98835
  peptide (1)..(303): Ceres Seq. ID no. 13601579

SEQ ID NO: 110075 - DNA, 1080 bp, Arabidopsis thaliana; identical to SEQ ID NO: 98836
  misc_feature (1)..(1080): Ceres Seq. ID no. 13601587
  misc_feature (1)..(1080): Ortholog of  Ceres SEQ ID NO 12557432 as cited in SEQ ID NO 92
  misc_feature (1)..(1080): Ortholog of  Ceres SEQ ID NO 14305097 as cited in SEQ ID NO 0

SEQ ID NO: 110076 - protein, 278 aa, Arabidopsis thaliana; identical to SEQ ID NO: 98837
  peptide (1)..(278): Ceres Seq. ID no. 13601588

SEQ ID NO: 110077 - protein, 253 aa, Arabidopsis thaliana; identical to SEQ ID NO: 98838
  peptide (1)..(253): Ceres Seq. ID no. 13601589

SEQ ID NO: 110078 - protein, 191 aa, Arabidopsis thaliana; identical to SEQ ID NO: 98839
  peptide (1)..(191): Ceres Seq. ID no. 13601590

SEQ ID NO: 110079 - DNA, 1364 bp, Arabidopsis thaliana; identical to SEQ ID NO: 98840
  misc_feature (1)..(1364): Ceres Seq. ID no. 13601591
  misc_feature (1)..(1364): Ortholog of  Ceres SEQ ID NO 14303790 as cited in SEQ ID NO 55525

SEQ ID NO: 110080 - protein, 453 aa, Arabidopsis thaliana; identical to SEQ ID NO: 98841
  peptide (1)..(453): Ceres Seq. ID no. 13601592

SEQ ID NO: 110081 - protein, 450 aa, Arabidopsis thaliana; identical to SEQ ID NO: 98842
  peptide (1)..(450): Ceres Seq. ID no. 13601593

SEQ ID NO: 110082 - protein, 414 aa, Arabidopsis thaliana; identical to SEQ ID NO: 98843
  peptide (1)..(414): Ceres Seq. ID no. 13601594

SEQ ID NO: 110083 - DNA, 612 bp, Arabidopsis thaliana; identical to SEQ ID NO: 98844
  misc_feature (1)..(612): Ceres Seq. ID no. 13601595
  misc_feature (1)..(612): Ortholog of  Ceres SEQ ID NO 13599549 as cited in SEQ ID NO 505

SEQ ID NO: 110084 - protein, 140 aa, Arabidopsis thaliana; identical to SEQ ID NO: 98845
  peptide (1)..(140): Ceres Seq. ID no. 13601596

SEQ ID NO: 110085 - protein, 134 aa, Arabidopsis thaliana; identical to SEQ ID NO: 98846
  peptide (1)..(134): Ceres Seq. ID no. 13601597

SEQ ID NO: 110086 - DNA, 2821 bp, Arabidopsis thaliana; identical to SEQ ID NO: 98847
  misc_feature (1)..(2821): Ceres Seq. ID no. 13601610
  misc_feature (1)..(2821): Ortholog of  Ceres SEQ ID NO 14310362 as cited in SEQ ID NO 54251
  misc_feature (1)..(2821): Ortholog of  Ceres SEQ ID NO 12583314 as cited in SEQ ID NO 56435
  misc_feature (1)..(2821): Ortholog of  Ceres SEQ ID NO 13654989 as cited in SEQ ID NO 63117
  misc_feature (1)..(2821): Ortholog of  Ceres SEQ ID NO 13584744 as cited in SEQ ID NO 69137

SEQ ID NO: 110087 - protein, 895 aa, Arabidopsis thaliana; identical to SEQ ID NO: 98848
  peptide (1)..(895): Ceres Seq. ID no. 13601611

SEQ ID NO: 110088 - protein, 880 aa, Arabidopsis thaliana; identical to SEQ ID NO: 98849
  peptide (1)..(880): Ceres Seq. ID no. 13601612

SEQ ID NO: 110089 - protein, 841 aa, Arabidopsis thaliana; identical to SEQ ID NO: 98850
  peptide (1)..(841): Ceres Seq. ID no. 13601613

SEQ ID NO: 110090 - DNA, 1504 bp, Arabidopsis thaliana; identical to SEQ ID NO: 98851
  misc_feature (1)..(1504): Ceres Seq. ID no. 13601614
  misc_feature (1)..(1504): Ortholog of  Ceres SEQ ID NO 14313049 as cited in SEQ ID NO 54099
  misc_feature (1)..(1504): Ortholog of  Ceres SEQ ID NO 14314054 as cited in SEQ ID NO 56939
  misc_feature (1)..(1504): Ortholog of  Ceres SEQ ID NO 14303592 as cited in SEQ ID NO 68603

SEQ ID NO: 110091 - protein, 470 aa, Arabidopsis thaliana; identical to SEQ ID NO: 98852
  peptide (1)..(470): Ceres Seq. ID no. 13601615

SEQ ID NO: 110092 - protein, 463 aa, Arabidopsis thaliana; identical to SEQ ID NO: 24175
  peptide (1)..(463): Ceres Seq. ID no. 13601616

SEQ ID NO: 110093 - protein, 290 aa, Arabidopsis thaliana; identical to SEQ ID NO: 24176
  peptide (1)..(290): Ceres Seq. ID no. 13601617

SEQ ID NO: 110094 - DNA, 772 bp, Arabidopsis thaliana; identical to SEQ ID NO: 98855
  misc_feature (1)..(772): Ceres Seq. ID no. 13601645
  misc_feature (1)..(772): Ortholog of  Ceres SEQ ID NO 15172821 as cited in SEQ ID NO 57953

SEQ ID NO: 110095 - protein, 127 aa, Arabidopsis thaliana; identical to SEQ ID NO: 47616
  peptide (1)..(127): Ceres Seq. ID no. 13601646

SEQ ID NO: 110096 - protein, 77 aa, Arabidopsis thaliana; identical to SEQ ID NO: 98857
  peptide (1)..(77): Ceres Seq. ID no. 13601647

SEQ ID NO: 110097 - DNA, 1745 bp, Arabidopsis thaliana; identical to SEQ ID NO: 98858
  misc_feature (1)..(1745): Ceres Seq. ID no. 13601656
  misc_feature (1)..(1745): Ortholog of  Ceres SEQ ID NO 14314620 as cited in SEQ ID NO 56872
  misc_feature (1)..(1745): Ortholog of  Ceres SEQ ID NO 15178460 as cited in SEQ ID NO 66107

SEQ ID NO: 110098 - protein, 500 aa, Arabidopsis thaliana; identical to SEQ ID NO: 42649
  peptide (1)..(500): Ceres Seq. ID no. 13601657

SEQ ID NO: 110099 - protein, 460 aa, Arabidopsis thaliana; identical to SEQ ID NO: 42650
  peptide (1)..(460): Ceres Seq. ID no. 13601658

SEQ ID NO: 110100 - protein, 402 aa, Arabidopsis thaliana; identical to SEQ ID NO: 42651
  peptide (1)..(402): Ceres Seq. ID no. 13601659

SEQ ID NO: 110101 - DNA, 1716 bp, Arabidopsis thaliana; identical to SEQ ID NO: 98862
  misc_feature (1)..(1716): Ceres Seq. ID no. 13601660
  misc_feature (1)..(1716): Ortholog of  Ceres SEQ ID NO 14310452 as cited in SEQ ID NO 54426
  misc_feature (1)..(1716): Ortholog of  Ceres SEQ ID NO 15169663 as cited in SEQ ID NO 64659
  misc_feature (1)..(1716): Ortholog of  Ceres SEQ ID NO 13656177 as cited in SEQ ID NO 64997

SEQ ID NO: 110102 - protein, 456 aa, Arabidopsis thaliana; identical to SEQ ID NO: 25574
  peptide (1)..(456): Ceres Seq. ID no. 13601661

SEQ ID NO: 110103 - protein, 327 aa, Arabidopsis thaliana; identical to SEQ ID NO: 25575
  peptide (1)..(327): Ceres Seq. ID no. 13601662

SEQ ID NO: 110104 - protein, 303 aa, Arabidopsis thaliana; identical to SEQ ID NO: 25576
  peptide (1)..(303): Ceres Seq. ID no. 13601663

SEQ ID NO: 110105 - DNA, 2072 bp, Arabidopsis thaliana; identical to SEQ ID NO: 98866
  misc_feature (1)..(2072): Ceres Seq. ID no. 13601664
  misc_feature (1)..(2072): Ortholog of  Ceres SEQ ID NO 13655755 as cited in SEQ ID NO 65117

SEQ ID NO: 110106 - protein, 629 aa, Arabidopsis thaliana; identical to SEQ ID NO: 40682
  peptide (1)..(629): Ceres Seq. ID no. 13601665

SEQ ID NO: 110107 - protein, 574 aa, Arabidopsis thaliana; identical to SEQ ID NO: 40683
  peptide (1)..(574): Ceres Seq. ID no. 13601666

SEQ ID NO: 110108 - protein, 468 aa, Arabidopsis thaliana; identical to SEQ ID NO: 40684
  peptide (1)..(468): Ceres Seq. ID no. 13601667

SEQ ID NO: 110109 - DNA, 1562 bp, Arabidopsis thaliana; identical to SEQ ID NO: 98870
  misc_feature (1)..(1562): Ceres Seq. ID no. 13601668
  misc_feature (1)..(1562): Ortholog of  Ceres SEQ ID NO 15169110 as cited in SEQ ID NO 58675

SEQ ID NO: 110110 - protein, 436 aa, Arabidopsis thaliana; identical to SEQ ID NO: 98871
  peptide (1)..(436): Ceres Seq. ID no. 13601669

SEQ ID NO: 110111 - protein, 388 aa, Arabidopsis thaliana; identical to SEQ ID NO: 98872
  peptide (1)..(388): Ceres Seq. ID no. 13601670

SEQ ID NO: 110112 - protein, 323 aa, Arabidopsis thaliana; identical to SEQ ID NO: 98873
  peptide (1)..(323): Ceres Seq. ID no. 13601671

SEQ ID NO: 110113 - DNA, 1327 bp, Arabidopsis thaliana; identical to SEQ ID NO: 98874
  misc_feature (1)..(1327): Ceres Seq. ID no. 13601676
  misc_feature (1)..(1327): Ortholog of  Ceres SEQ ID NO 15227099 as cited in SEQ ID NO 53558
  misc_feature (1)..(1327): Ortholog of  Ceres SEQ ID NO 14314563 as cited in SEQ ID NO 59349
  misc_feature (1)..(1327): Ortholog of  Ceres SEQ ID NO 12616360 as cited in SEQ ID NO 63543

SEQ ID NO: 110114 - protein, 406 aa, Arabidopsis thaliana; identical to SEQ ID NO: 98875
  peptide (1)..(406): Ceres Seq. ID no. 13601677

SEQ ID NO: 110115 - protein, 324 aa, Arabidopsis thaliana; identical to SEQ ID NO: 23832
  peptide (1)..(324): Ceres Seq. ID no. 13601678

SEQ ID NO: 110116 - protein, 268 aa, Arabidopsis thaliana; identical to SEQ ID NO: 23833
  peptide (1)..(268): Ceres Seq. ID no. 13601679

SEQ ID NO: 110117 - DNA, 815 bp, Arabidopsis thaliana; identical to SEQ ID NO: 98878
  misc_feature (1)..(815): Ceres Seq. ID no. 13601680
  misc_feature (1)..(815): Ortholog of  Ceres SEQ ID NO 13638658 as cited in SEQ ID NO 51921
  misc_feature (1)..(815): Ortholog of  Ceres SEQ ID NO 14306522 as cited in SEQ ID NO 53365
  misc_feature (1)..(815): Ortholog of  Ceres SEQ ID NO 15175175 as cited in SEQ ID NO 0

SEQ ID NO: 110118 - protein, 226 aa, Arabidopsis thaliana; identical to SEQ ID NO: 98879
  peptide (1)..(226): Ceres Seq. ID no. 13601681

SEQ ID NO: 110119 - protein, 202 aa, Arabidopsis thaliana; identical to SEQ ID NO: 98880
  peptide (1)..(202): Ceres Seq. ID no. 13601682

SEQ ID NO: 110120 - protein, 186 aa, Arabidopsis thaliana; identical to SEQ ID NO: 98881
  peptide (1)..(186): Ceres Seq. ID no. 13601683

SEQ ID NO: 110121 - DNA, 1130 bp, Arabidopsis thaliana; identical to SEQ ID NO: 98882
  misc_feature (1)..(1130): Ceres Seq. ID no. 13601688
  misc_feature (1)..(1130): Ortholog of  Ceres SEQ ID NO 13600141 as cited in SEQ ID NO 0

SEQ ID NO: 110122 - protein, 330 aa, Arabidopsis thaliana; identical to SEQ ID NO: 98883
  peptide (1)..(330): Ceres Seq. ID no. 13601689

SEQ ID NO: 110123 - protein, 300 aa, Arabidopsis thaliana; identical to SEQ ID NO: 30774
  peptide (1)..(300): Ceres Seq. ID no. 13601690

SEQ ID NO: 110124 - protein, 248 aa, Arabidopsis thaliana; identical to SEQ ID NO: 30775
  peptide (1)..(248): Ceres Seq. ID no. 13601691

SEQ ID NO: 110125 - DNA, 1166 bp, Arabidopsis thaliana; identical to SEQ ID NO: 98886
  misc_feature (1)..(1166): Ceres Seq. ID no. 13601692
  misc_feature (1)..(1166): Ortholog of  Ceres SEQ ID NO 13655124 as cited in SEQ ID NO 62896
  misc_feature (1)..(1166): Ortholog of  Ceres SEQ ID NO 14301898 as cited in SEQ ID NO 69243

SEQ ID NO: 110126 - protein, 327 aa, Arabidopsis thaliana; identical to SEQ ID NO: 98887
  peptide (1)..(327): Ceres Seq. ID no. 13601693

SEQ ID NO: 110127 - protein, 316 aa, Arabidopsis thaliana; identical to SEQ ID NO: 98888
  peptide (1)..(316): Ceres Seq. ID no. 13601694

SEQ ID NO: 110128 - protein, 302 aa, Arabidopsis thaliana; identical to SEQ ID NO: 98889
  peptide (1)..(302): Ceres Seq. ID no. 13601695

SEQ ID NO: 110129 - DNA, 1669 bp, Arabidopsis thaliana; identical to SEQ ID NO: 98890
  misc_feature (1)..(1669): Ceres Seq. ID no. 13601696
  misc_feature (1)..(1669): Ortholog of  Ceres SEQ ID NO 13662164 as cited in SEQ ID NO 67158

SEQ ID NO: 110130 - protein, 415 aa, Arabidopsis thaliana; identical to SEQ ID NO: 22908
  peptide (1)..(415): Ceres Seq. ID no. 13601697

SEQ ID NO: 110131 - protein, 341 aa, Arabidopsis thaliana; identical to SEQ ID NO: 22909
  peptide (1)..(341): Ceres Seq. ID no. 13601698

SEQ ID NO: 110132 - protein, 334 aa, Arabidopsis thaliana; identical to SEQ ID NO: 22910
  peptide (1)..(334): Ceres Seq. ID no. 13601699

SEQ ID NO: 110133 - DNA, 1136 bp, Arabidopsis thaliana; identical to SEQ ID NO: 98894
  misc_feature (1)..(1136): Ceres Seq. ID no. 13601700
  misc_feature (1)..(1136): Ortholog of  Ceres SEQ ID NO 14315455 as cited in SEQ ID NO 56988

SEQ ID NO: 110134 - protein, 299 aa, Arabidopsis thaliana; identical to SEQ ID NO: 21940
  peptide (1)..(299): Ceres Seq. ID no. 13601701

SEQ ID NO: 110135 - protein, 291 aa, Arabidopsis thaliana; identical to SEQ ID NO: 21941
  peptide (1)..(291): Ceres Seq. ID no. 13601702

SEQ ID NO: 110136 - protein, 166 aa, Arabidopsis thaliana; identical to SEQ ID NO: 21942
  peptide (1)..(166): Ceres Seq. ID no. 13601703

SEQ ID NO: 110137 - DNA, 1668 bp, Arabidopsis thaliana; identical to SEQ ID NO: 98898
  misc_feature (1)..(1668): Ceres Seq. ID no. 13601704
  misc_feature (1)..(1668): Ortholog of  Ceres SEQ ID NO 14315196 as cited in SEQ ID NO 57698

SEQ ID NO: 110138 - protein, 429 aa, Arabidopsis thaliana; identical to SEQ ID NO: 38335
  peptide (1)..(429): Ceres Seq. ID no. 13601705

SEQ ID NO: 110139 - protein, 347 aa, Arabidopsis thaliana; identical to SEQ ID NO: 38336
  peptide (1)..(347): Ceres Seq. ID no. 13601706

SEQ ID NO: 110140 - protein, 333 aa, Arabidopsis thaliana; identical to SEQ ID NO: 38337
  peptide (1)..(333): Ceres Seq. ID no. 13601707

SEQ ID NO: 110141 - DNA, 486 bp, Arabidopsis thaliana; identical to SEQ ID NO: 98902
  misc_feature (1)..(486): Ceres Seq. ID no. 13601724
  misc_feature (1)..(486): Ortholog of  Ceres SEQ ID NO 12635836 as cited in SEQ ID NO 0
  misc_feature (1)..(486): Ortholog of  Ceres SEQ ID NO 13599004 as cited in SEQ ID NO 0

SEQ ID NO: 110142 - protein, 78 aa, Arabidopsis thaliana; identical to SEQ ID NO: 35309
  peptide (1)..(78): Ceres Seq. ID no. 13601725

SEQ ID NO: 110143 - protein, 41 aa, Arabidopsis thaliana; identical to SEQ ID NO: 35310
  peptide (1)..(41): Ceres Seq. ID no. 13601726

SEQ ID NO: 110144 - DNA, 1120 bp, Arabidopsis thaliana; identical to SEQ ID NO: 98905
  misc_feature (1)..(1120): Ceres Seq. ID no. 13601727
  misc_feature (1)..(1120): Ortholog of  Ceres SEQ ID NO 15224924 as cited in SEQ ID NO 64061

SEQ ID NO: 110145 - protein, 292 aa, Arabidopsis thaliana; identical to SEQ ID NO: 98906
  peptide (1)..(292): Ceres Seq. ID no. 13601728

SEQ ID NO: 110146 - protein, 273 aa, Arabidopsis thaliana; identical to SEQ ID NO: 98907
  peptide (1)..(273): Ceres Seq. ID no. 13601729

SEQ ID NO: 110147 - protein, 219 aa, Arabidopsis thaliana; identical to SEQ ID NO: 27453
  peptide (1)..(219): Ceres Seq. ID no. 13601730

SEQ ID NO: 110148 - DNA, 1498 bp, Arabidopsis thaliana; identical to SEQ ID NO: 98909
  misc_feature (1)..(1498): Ceres Seq. ID no. 13601739
  misc_feature (1)..(1498): Ortholog of  Ceres SEQ ID NO 15174737 as cited in SEQ ID NO 52912
  misc_feature (1)..(1498): Ortholog of  Ceres SEQ ID NO 13624551 as cited in SEQ ID NO 0

SEQ ID NO: 110149 - protein, 347 aa, Arabidopsis thaliana; identical to SEQ ID NO: 98910
  peptide (1)..(347): Ceres Seq. ID no. 13601740

SEQ ID NO: 110150 - protein, 338 aa, Arabidopsis thaliana; identical to SEQ ID NO: 98911
  peptide (1)..(338): Ceres Seq. ID no. 13601741

SEQ ID NO: 110151 - protein, 243 aa, Arabidopsis thaliana; identical to SEQ ID NO: 98912
  peptide (1)..(243): Ceres Seq. ID no. 13601742

SEQ ID NO: 110152 - DNA, 1382 bp, Arabidopsis thaliana; identical to SEQ ID NO: 98913
  misc_feature (1)..(1382): Ceres Seq. ID no. 13601745
  misc_feature (1)..(1382): Ortholog of  Ceres SEQ ID NO 14308867 as cited in SEQ ID NO 55300

SEQ ID NO: 110153 - protein, 354 aa, Arabidopsis thaliana; identical to SEQ ID NO: 98914
  peptide (1)..(354): Ceres Seq. ID no. 13601746

SEQ ID NO: 110154 - protein, 281 aa, Arabidopsis thaliana; identical to SEQ ID NO: 98915
  peptide (1)..(281): Ceres Seq. ID no. 13601747

SEQ ID NO: 110155 - protein, 253 aa, Arabidopsis thaliana; identical to SEQ ID NO: 98916
  peptide (1)..(253): Ceres Seq. ID no. 13601748

SEQ ID NO: 110156 - DNA, 957 bp, Arabidopsis thaliana; identical to SEQ ID NO: 98917
  misc_feature (1)..(957): Ceres Seq. ID no. 13601753
  misc_feature (1)..(957): Ortholog of  Ceres SEQ ID NO 14306264 as cited in SEQ ID NO 1386
  misc_feature (1)..(957): Ortholog of  Ceres SEQ ID NO 13600592 as cited in SEQ ID NO 1398
  misc_feature (1)..(957): Ortholog of  Ceres SEQ ID NO 15179159 as cited in SEQ ID NO 0

SEQ ID NO: 110157 - protein, 241 aa, Arabidopsis thaliana; identical to SEQ ID NO: 98918
  peptide (1)..(241): Ceres Seq. ID no. 13601754

SEQ ID NO: 110158 - protein, 185 aa, Arabidopsis thaliana; identical to SEQ ID NO: 98919
  peptide (1)..(185): Ceres Seq. ID no. 13601755

SEQ ID NO: 110159 - protein, 168 aa, Arabidopsis thaliana; identical to SEQ ID NO: 98920
  peptide (1)..(168): Ceres Seq. ID no. 13601756

SEQ ID NO: 110160 - DNA, 2022 bp, Arabidopsis thaliana; identical to SEQ ID NO: 98921
  misc_feature (1)..(2022): Ceres Seq. ID no. 13601765
  misc_feature (1)..(2022): Ortholog of  Ceres SEQ ID NO 12465083 as cited in SEQ ID NO 68239

SEQ ID NO: 110161 - protein, 563 aa, Arabidopsis thaliana; identical to SEQ ID NO: 77902
  peptide (1)..(563): Ceres Seq. ID no. 13601766

SEQ ID NO: 110162 - protein, 477 aa, Arabidopsis thaliana; identical to SEQ ID NO: 77903
  peptide (1)..(477): Ceres Seq. ID no. 13601767

SEQ ID NO: 110163 - protein, 468 aa, Arabidopsis thaliana; identical to SEQ ID NO: 77904
  peptide (1)..(468): Ceres Seq. ID no. 13601768

SEQ ID NO: 110164 - DNA, 604 bp, Arabidopsis thaliana; identical to SEQ ID NO: 98925
  misc_feature (1)..(604): Ceres Seq. ID no. 13601769
  misc_feature (1)..(604): Ortholog of  Ceres SEQ ID NO 13595763 as cited in SEQ ID NO 57864

SEQ ID NO: 110165 - protein, 139 aa, Arabidopsis thaliana; identical to SEQ ID NO: 20992
  peptide (1)..(139): Ceres Seq. ID no. 13601770

SEQ ID NO: 110166 - protein, 134 aa, Arabidopsis thaliana; identical to SEQ ID NO: 20993
  peptide (1)..(134): Ceres Seq. ID no. 13601771

SEQ ID NO: 110167 - protein, 106 aa, Arabidopsis thaliana; identical to SEQ ID NO: 20994
  peptide (1)..(106): Ceres Seq. ID no. 13601772

SEQ ID NO: 110168 - DNA, 1526 bp, Arabidopsis thaliana; identical to SEQ ID NO: 98929
  misc_feature (1)..(1526): Ceres Seq. ID no. 13601777
  misc_feature (1)..(1526): Ortholog of  Ceres SEQ ID NO 13581947 as cited in SEQ ID NO 51812

SEQ ID NO: 110169 - protein, 332 aa, Arabidopsis thaliana; identical to SEQ ID NO: 23873
  peptide (1)..(332): Ceres Seq. ID no. 13601778

SEQ ID NO: 110170 - protein, 247 aa, Arabidopsis thaliana; identical to SEQ ID NO: 23874
  peptide (1)..(247): Ceres Seq. ID no. 13601779

SEQ ID NO: 110171 - DNA, 930 bp, Arabidopsis thaliana; identical to SEQ ID NO: 98932
  misc_feature (1)..(930): Ceres Seq. ID no. 13601780
  misc_feature (1)..(930): Ortholog of  Ceres SEQ ID NO 14304569 as cited in SEQ ID NO 53472
  misc_feature (1)..(930): Ortholog of  Ceres SEQ ID NO 13584234 as cited in SEQ ID NO 64110

SEQ ID NO: 110172 - protein, 253 aa, Arabidopsis thaliana; identical to SEQ ID NO: 98933
  peptide (1)..(253): Ceres Seq. ID no. 13601781

SEQ ID NO: 110173 - protein, 239 aa, Arabidopsis thaliana; identical to SEQ ID NO: 98934
  peptide (1)..(239): Ceres Seq. ID no. 13601782

SEQ ID NO: 110174 - protein, 159 aa, Arabidopsis thaliana; identical to SEQ ID NO: 98935
  peptide (1)..(159): Ceres Seq. ID no. 13601783

SEQ ID NO: 110175 - DNA, 2801 bp, Arabidopsis thaliana; identical to SEQ ID NO: 98936
  misc_feature (1)..(2801): Ceres Seq. ID no. 13601800
  misc_feature (1)..(2801): Ortholog of  Ceres SEQ ID NO 12616314 as cited in SEQ ID NO 64355

SEQ ID NO: 110176 - protein, 391 aa, Arabidopsis thaliana; identical to SEQ ID NO: 98937
  peptide (1)..(391): Ceres Seq. ID no. 13601801

SEQ ID NO: 110177 - protein, 289 aa, Arabidopsis thaliana; identical to SEQ ID NO: 98938
  peptide (1)..(289): Ceres Seq. ID no. 13601802

SEQ ID NO: 110178 - protein, 288 aa, Arabidopsis thaliana; identical to SEQ ID NO: 98939
  peptide (1)..(288): Ceres Seq. ID no. 13601803

SEQ ID NO: 110179 - DNA, 1799 bp, Arabidopsis thaliana; identical to SEQ ID NO: 98940
  misc_feature (1)..(1799): Ceres Seq. ID no. 13601804
  misc_feature (1)..(1799): Ortholog of  Ceres SEQ ID NO 13594209 as cited in SEQ ID NO 59089
  misc_feature (1)..(1799): Ortholog of  Ceres SEQ ID NO 15169627 as cited in SEQ ID NO 64517
  misc_feature (1)..(1799): Ortholog of  Ceres SEQ ID NO 14307952 as cited in SEQ ID NO 66029
  misc_feature (1)..(1799): Ortholog of  Ceres SEQ ID NO 12614124 as cited in SEQ ID NO 68392

SEQ ID NO: 110180 - protein, 511 aa, Arabidopsis thaliana; identical to SEQ ID NO: 98941
  peptide (1)..(511): Ceres Seq. ID no. 13601805

SEQ ID NO: 110181 - protein, 328 aa, Arabidopsis thaliana; identical to SEQ ID NO: 98942
  peptide (1)..(328): Ceres Seq. ID no. 13601806

SEQ ID NO: 110182 - protein, 321 aa, Arabidopsis thaliana; identical to SEQ ID NO: 98943
  peptide (1)..(321): Ceres Seq. ID no. 13601807

SEQ ID NO: 110183 - DNA, 1500 bp, Arabidopsis thaliana; identical to SEQ ID NO: 98944
  misc_feature (1)..(1500): Ceres Seq. ID no. 13601808
  misc_feature (1)..(1500): Ortholog of  Ceres SEQ ID NO 15177652 as cited in SEQ ID NO 56858
  misc_feature (1)..(1500): Ortholog of  Ceres SEQ ID NO 13596932 as cited in SEQ ID NO 62984
  misc_feature (1)..(1500): Ortholog of  Ceres SEQ ID NO 13662197 as cited in SEQ ID NO 63622

SEQ ID NO: 110184 - protein, 464 aa, Arabidopsis thaliana; identical to SEQ ID NO: 98945
  peptide (1)..(464): Ceres Seq. ID no. 13601809

SEQ ID NO: 110185 - protein, 454 aa, Arabidopsis thaliana; identical to SEQ ID NO: 98946
  peptide (1)..(454): Ceres Seq. ID no. 13601810

SEQ ID NO: 110186 - protein, 279 aa, Arabidopsis thaliana; identical to SEQ ID NO: 98947
  peptide (1)..(279): Ceres Seq. ID no. 13601811

SEQ ID NO: 110187 - DNA, 912 bp, Arabidopsis thaliana; identical to SEQ ID NO: 98948
  misc_feature (1)..(912): Ceres Seq. ID no. 13601823
  misc_feature (1)..(912): Ortholog of  Ceres SEQ ID NO 13574681 as cited in SEQ ID NO 19

SEQ ID NO: 110188 - protein, 242 aa, Arabidopsis thaliana; identical to SEQ ID NO: 98949
  peptide (1)..(242): Ceres Seq. ID no. 13601824

SEQ ID NO: 110189 - protein, 219 aa, Arabidopsis thaliana; identical to SEQ ID NO: 98950
  peptide (1)..(219): Ceres Seq. ID no. 13601825

SEQ ID NO: 110190 - protein, 182 aa, Arabidopsis thaliana; identical to SEQ ID NO: 98951
  peptide (1)..(182): Ceres Seq. ID no. 13601826

SEQ ID NO: 110191 - DNA, 1124 bp, Arabidopsis thaliana; identical to SEQ ID NO: 98952
  misc_feature (1)..(1124): Ceres Seq. ID no. 13601831
  misc_feature (1)..(1124): Ortholog of  Ceres SEQ ID NO 13596474 as cited in SEQ ID NO 62169
  misc_feature (1)..(1124): Ortholog of  Ceres SEQ ID NO 13596969 as cited in SEQ ID NO 63375
  misc_feature (1)..(1124): Ortholog of  Ceres SEQ ID NO 13597519 as cited in SEQ ID NO 64759
  misc_feature (1)..(1124): Ortholog of  Ceres SEQ ID NO 13597870 as cited in SEQ ID NO 64982
  misc_feature (1)..(1124): Ortholog of  Ceres SEQ ID NO 13595926 as cited in SEQ ID NO 67778

SEQ ID NO: 110192 - protein, 330 aa, Arabidopsis thaliana; identical to SEQ ID NO: 98953
  peptide (1)..(330): Ceres Seq. ID no. 13601832

SEQ ID NO: 110193 - protein, 321 aa, Arabidopsis thaliana; identical to SEQ ID NO: 98954
  peptide (1)..(321): Ceres Seq. ID no. 13601833

SEQ ID NO: 110194 - protein, 262 aa, Arabidopsis thaliana; identical to SEQ ID NO: 98955
  peptide (1)..(262): Ceres Seq. ID no. 13601834

SEQ ID NO: 110195 - DNA, 1937 bp, Arabidopsis thaliana; identical to SEQ ID NO: 98956
  misc_feature (1)..(1937): Ceres Seq. ID no. 13601856
  misc_feature (1)..(1937): Ortholog of  Ceres SEQ ID NO 12465151 as cited in SEQ ID NO 67782

SEQ ID NO: 110196 - protein, 561 aa, Arabidopsis thaliana; identical to SEQ ID NO: 98957
  peptide (1)..(561): Ceres Seq. ID no. 13601857

SEQ ID NO: 110197 - protein, 424 aa, Arabidopsis thaliana; identical to SEQ ID NO: 23265
  peptide (1)..(424): Ceres Seq. ID no. 13601858

SEQ ID NO: 110198 - protein, 417 aa, Arabidopsis thaliana; identical to SEQ ID NO: 23266
  peptide (1)..(417): Ceres Seq. ID no. 13601859

SEQ ID NO: 110199 - DNA, 784 bp, Arabidopsis thaliana; identical to SEQ ID NO: 98960
  misc_feature (1)..(784): Ceres Seq. ID no. 13601860
  misc_feature (1)..(784): Ortholog of  Ceres SEQ ID NO 13582876 as cited in SEQ ID NO 68251
  misc_feature (1)..(784): Ortholog of  Ceres SEQ ID NO 15179090 as cited in SEQ ID NO 0

SEQ ID NO: 110200 - protein, 182 aa, Arabidopsis thaliana; identical to SEQ ID NO: 98961
  peptide (1)..(182): Ceres Seq. ID no. 13601861

SEQ ID NO: 110201 - protein, 180 aa, Arabidopsis thaliana; identical to SEQ ID NO: 98962
  peptide (1)..(180): Ceres Seq. ID no. 13601862

SEQ ID NO: 110202 - protein, 160 aa, Arabidopsis thaliana; identical to SEQ ID NO: 98963
  peptide (1)..(160): Ceres Seq. ID no. 13601863

SEQ ID NO: 110203 - DNA, 1645 bp, Arabidopsis thaliana; identical to SEQ ID NO: 98964
  misc_feature (1)..(1645): Ceres Seq. ID no. 13601864
  misc_feature (1)..(1645): Ortholog of  Ceres SEQ ID NO 13590307 as cited in SEQ ID NO 67154

SEQ ID NO: 110204 - protein, 443 aa, Arabidopsis thaliana; identical to SEQ ID NO: 25547
  peptide (1)..(443): Ceres Seq. ID no. 13601865

SEQ ID NO: 110205 - protein, 441 aa, Arabidopsis thaliana; identical to SEQ ID NO: 25548
  peptide (1)..(441): Ceres Seq. ID no. 13601866

SEQ ID NO: 110206 - protein, 334 aa, Arabidopsis thaliana; identical to SEQ ID NO: 25549
  peptide (1)..(334): Ceres Seq. ID no. 13601867

SEQ ID NO: 110207 - DNA, 786 bp, Arabidopsis thaliana; identical to SEQ ID NO: 98968
  misc_feature (1)..(786): Ceres Seq. ID no. 13601868
  misc_feature (1)..(786): Ortholog of  Ceres SEQ ID NO 14309641 as cited in SEQ ID NO 0

SEQ ID NO: 110208 - protein, 199 aa, Arabidopsis thaliana; identical to SEQ ID NO: 98969
  peptide (1)..(199): Ceres Seq. ID no. 13601869

SEQ ID NO: 110209 - DNA, 999 bp, Arabidopsis thaliana; identical to SEQ ID NO: 98970
  misc_feature (1)..(999): Ceres Seq. ID no. 13601874
  misc_feature (1)..(999): Ortholog of  Ceres SEQ ID NO 12615296 as cited in SEQ ID NO 62724
  misc_feature (1)..(999): Ortholog of  Ceres SEQ ID NO 15225093 as cited in SEQ ID NO 65177
  misc_feature (1)..(999): Ortholog of  Ceres SEQ ID NO 15179532 as cited in SEQ ID NO 0

SEQ ID NO: 110210 - protein, 268 aa, Arabidopsis thaliana; identical to SEQ ID NO: 98971
  peptide (1)..(268): Ceres Seq. ID no. 13601875

SEQ ID NO: 110211 - protein, 258 aa, Arabidopsis thaliana; identical to SEQ ID NO: 29515
  peptide (1)..(258): Ceres Seq. ID no. 13601876

SEQ ID NO: 110212 - DNA, 1067 bp, Arabidopsis thaliana; identical to SEQ ID NO: 98973
  misc_feature (1)..(1067): Ceres Seq. ID no. 13601877
  misc_feature (1)..(1067): Ortholog of  Ceres SEQ ID NO 13594430 as cited in SEQ ID NO 60181
  misc_feature (1)..(1067): Ortholog of  Ceres SEQ ID NO 13589401 as cited in SEQ ID NO 0

SEQ ID NO: 110213 - protein, 226 aa, Arabidopsis thaliana; identical to SEQ ID NO: 41512
  peptide (1)..(226): Ceres Seq. ID no. 13601878

SEQ ID NO: 110214 - protein, 191 aa, Arabidopsis thaliana; identical to SEQ ID NO: 41513
  peptide (1)..(191): Ceres Seq. ID no. 13601879

SEQ ID NO: 110215 - protein, 140 aa, Arabidopsis thaliana; identical to SEQ ID NO: 41514
  peptide (1)..(140): Ceres Seq. ID no. 13601880

SEQ ID NO: 110216 - DNA, 930 bp, Arabidopsis thaliana; identical to SEQ ID NO: 98977
  misc_feature (1)..(930): Ceres Seq. ID no. 13601881
  misc_feature (1)..(930): Ortholog of  Ceres SEQ ID NO 13504265 as cited in SEQ ID NO 85

SEQ ID NO: 110217 - protein, 231 aa, Arabidopsis thaliana; identical to SEQ ID NO: 29575
  peptide (1)..(231): Ceres Seq. ID no. 13601882

SEQ ID NO: 110218 - protein, 180 aa, Arabidopsis thaliana; identical to SEQ ID NO: 29576
  peptide (1)..(180): Ceres Seq. ID no. 13601883

SEQ ID NO: 110219 - DNA, 1074 bp, Arabidopsis thaliana; identical to SEQ ID NO: 98980
  misc_feature (1)..(1074): Ceres Seq. ID no. 13601884
  misc_feature (1)..(1074): Ortholog of  Ceres SEQ ID NO 14312769 as cited in SEQ ID NO 55493
  misc_feature (1)..(1074): Ortholog of  Ceres SEQ ID NO 13639300 as cited in SEQ ID NO 56701

SEQ ID NO: 110220 - protein, 282 aa, Arabidopsis thaliana; identical to SEQ ID NO: 98981
  peptide (1)..(282): Ceres Seq. ID no. 13601885

SEQ ID NO: 110221 - protein, 215 aa, Arabidopsis thaliana; identical to SEQ ID NO: 26565
  peptide (1)..(215): Ceres Seq. ID no. 13601886

SEQ ID NO: 110222 - protein, 208 aa, Arabidopsis thaliana; identical to SEQ ID NO: 26566
  peptide (1)..(208): Ceres Seq. ID no. 13601887

SEQ ID NO: 110223 - DNA, 981 bp, Arabidopsis thaliana; identical to SEQ ID NO: 98984
  misc_feature (1)..(981): Ceres Seq. ID no. 13601888
  misc_feature (1)..(981): Ortholog of  Ceres SEQ ID NO 15170807 as cited in SEQ ID NO 52723
  misc_feature (1)..(981): Ortholog of  Ceres SEQ ID NO 12611846 as cited in SEQ ID NO 59904
  misc_feature (1)..(981): Ortholog of  Ceres SEQ ID NO 14303535 as cited in SEQ ID NO 68728
  misc_feature (1)..(981): Ortholog of  Ceres SEQ ID NO 12635196 as cited in SEQ ID NO 0
  misc_feature (1)..(981): Ortholog of  Ceres SEQ ID NO 15179463 as cited in SEQ ID NO 0

SEQ ID NO: 110224 - protein, 255 aa, Arabidopsis thaliana; identical to SEQ ID NO: 98985
  peptide (1)..(255): Ceres Seq. ID no. 13601889

SEQ ID NO: 110225 - protein, 253 aa, Arabidopsis thaliana; identical to SEQ ID NO: 98986
  peptide (1)..(253): Ceres Seq. ID no. 13601890

SEQ ID NO: 110226 - protein, 185 aa, Arabidopsis thaliana; identical to SEQ ID NO: 98987
  peptide (1)..(185): Ceres Seq. ID no. 13601891

SEQ ID NO: 110227 - DNA, 1106 bp, Arabidopsis thaliana; identical to SEQ ID NO: 98988
  misc_feature (1)..(1106): Ceres Seq. ID no. 13601892
  misc_feature (1)..(1106): Ortholog of  Ceres SEQ ID NO 14314312 as cited in SEQ ID NO 57283

SEQ ID NO: 110228 - protein, 276 aa, Arabidopsis thaliana; identical to SEQ ID NO: 98989
  peptide (1)..(276): Ceres Seq. ID no. 13601893

SEQ ID NO: 110229 - protein, 249 aa, Arabidopsis thaliana; identical to SEQ ID NO: 42107
  peptide (1)..(249): Ceres Seq. ID no. 13601894

SEQ ID NO: 110230 - protein, 141 aa, Arabidopsis thaliana; identical to SEQ ID NO: 42108
  peptide (1)..(141): Ceres Seq. ID no. 13601895

SEQ ID NO: 110231 - DNA, 1005 bp, Arabidopsis thaliana; identical to SEQ ID NO: 98992
  misc_feature (1)..(1005): Ceres Seq. ID no. 13601919
  misc_feature (1)..(1005): Ortholog of  Ceres SEQ ID NO 13574576 as cited in SEQ ID NO 47
  misc_feature (1)..(1005): Ortholog of  Ceres SEQ ID NO 13638673 as cited in SEQ ID NO 51830
  misc_feature (1)..(1005): Ortholog of  Ceres SEQ ID NO 13638785 as cited in SEQ ID NO 51967

SEQ ID NO: 110232 - protein, 266 aa, Arabidopsis thaliana; identical to SEQ ID NO: 21484
  peptide (1)..(266): Ceres Seq. ID no. 13601920

SEQ ID NO: 110233 - DNA, 910 bp, Arabidopsis thaliana; identical to SEQ ID NO: 98994
  misc_feature (1)..(910): Ceres Seq. ID no. 13601921
  misc_feature (1)..(910): Ortholog of  Ceres SEQ ID NO 14303374 as cited in SEQ ID NO 54088
  misc_feature (1)..(910): Ortholog of  Ceres SEQ ID NO 13639250 as cited in SEQ ID NO 56555
  misc_feature (1)..(910): Ortholog of  Ceres SEQ ID NO 15177034 as cited in SEQ ID NO 60024
  misc_feature (1)..(910): Ortholog of  Ceres SEQ ID NO 13598257 as cited in SEQ ID NO 63008
  misc_feature (1)..(910): Ortholog of  Ceres SEQ ID NO 13597309 as cited in SEQ ID NO 63851
  misc_feature (1)..(910): Ortholog of  Ceres SEQ ID NO 12599167 as cited in SEQ ID NO 64443

SEQ ID NO: 110234 - protein, 209 aa, Arabidopsis thaliana; identical to SEQ ID NO: 27986
  peptide (1)..(209): Ceres Seq. ID no. 13601922

SEQ ID NO: 110235 - DNA, 2150 bp, Arabidopsis thaliana; identical to SEQ ID NO: 98996
  misc_feature (1)..(2150): Ceres Seq. ID no. 13601923
  misc_feature (1)..(2150): Ortholog of  Ceres SEQ ID NO 14312825 as cited in SEQ ID NO 55638

SEQ ID NO: 110236 - protein, 626 aa, Arabidopsis thaliana; identical to SEQ ID NO: 40160
  peptide (1)..(626): Ceres Seq. ID no. 13601924

SEQ ID NO: 110237 - protein, 610 aa, Arabidopsis thaliana; identical to SEQ ID NO: 40161
  peptide (1)..(610): Ceres Seq. ID no. 13601925

SEQ ID NO: 110238 - protein, 579 aa, Arabidopsis thaliana; identical to SEQ ID NO: 40162
  peptide (1)..(579): Ceres Seq. ID no. 13601926

SEQ ID NO: 110239 - DNA, 813 bp, Arabidopsis thaliana; identical to SEQ ID NO: 99000
  misc_feature (1)..(813): Ceres Seq. ID no. 13601927
  misc_feature (1)..(813): Ortholog of  Ceres SEQ ID NO 12619999 as cited in SEQ ID NO 66123
  misc_feature (1)..(813): Ortholog of  Ceres SEQ ID NO 13656436 as cited in SEQ ID NO 69154

SEQ ID NO: 110240 - protein, 205 aa, Arabidopsis thaliana; identical to SEQ ID NO: 36924
  peptide (1)..(205): Ceres Seq. ID no. 13601928

SEQ ID NO: 110241 - protein, 113 aa, Arabidopsis thaliana; identical to SEQ ID NO: 36925
  peptide (1)..(113): Ceres Seq. ID no. 13601929

SEQ ID NO: 110242 - DNA, 1111 bp, Arabidopsis thaliana; identical to SEQ ID NO: 99003
  misc_feature (1)..(1111): Ceres Seq. ID no. 13601936
  misc_feature (1)..(1111): Ortholog of  Ceres SEQ ID NO 12598859 as cited in SEQ ID NO 62872
  misc_feature (1)..(1111): Ortholog of  Ceres SEQ ID NO 12617350 as cited in SEQ ID NO 63777
  misc_feature (1)..(1111): Ortholog of  Ceres SEQ ID NO 13598749 as cited in SEQ ID NO 64341
  misc_feature (1)..(1111): Ortholog of  Ceres SEQ ID NO 15179157 as cited in SEQ ID NO 0

SEQ ID NO: 110243 - protein, 329 aa, Arabidopsis thaliana; identical to SEQ ID NO: 24227
  peptide (1)..(329): Ceres Seq. ID no. 13601937

SEQ ID NO: 110244 - protein, 323 aa, Arabidopsis thaliana; identical to SEQ ID NO: 24228
  peptide (1)..(323): Ceres Seq. ID no. 13601938

SEQ ID NO: 110245 - protein, 164 aa, Arabidopsis thaliana; identical to SEQ ID NO: 24229
  peptide (1)..(164): Ceres Seq. ID no. 13601939

SEQ ID NO: 110246 - DNA, 1475 bp, Arabidopsis thaliana; identical to SEQ ID NO: 99007
  misc_feature (1)..(1475): Ceres Seq. ID no. 13601940
  misc_feature (1)..(1475): Ortholog of  Ceres SEQ ID NO 14310740 as cited in SEQ ID NO 53755
  misc_feature (1)..(1475): Ortholog of  Ceres SEQ ID NO 13596202 as cited in SEQ ID NO 68492

SEQ ID NO: 110247 - protein, 395 aa, Arabidopsis thaliana; identical to SEQ ID NO: 43409
  peptide (1)..(395): Ceres Seq. ID no. 13601941

SEQ ID NO: 110248 - protein, 319 aa, Arabidopsis thaliana; identical to SEQ ID NO: 43410
  peptide (1)..(319): Ceres Seq. ID no. 13601942

SEQ ID NO: 110249 - protein, 318 aa, Arabidopsis thaliana; identical to SEQ ID NO: 43411
  peptide (1)..(318): Ceres Seq. ID no. 13601943

SEQ ID NO: 110250 - DNA, 875 bp, Arabidopsis thaliana; identical to SEQ ID NO: 99011
  misc_feature (1)..(875): Ceres Seq. ID no. 13601958
  misc_feature (1)..(875): Ortholog of  Ceres SEQ ID NO 13585222 as cited in SEQ ID NO 68696

SEQ ID NO: 110251 - protein, 195 aa, Arabidopsis thaliana; identical to SEQ ID NO: 99012
  peptide (1)..(195): Ceres Seq. ID no. 13601959

SEQ ID NO: 110252 - protein, 154 aa, Arabidopsis thaliana; identical to SEQ ID NO: 99013
  peptide (1)..(154): Ceres Seq. ID no. 13601960

SEQ ID NO: 110253 - protein, 144 aa, Arabidopsis thaliana; identical to SEQ ID NO: 99014
  peptide (1)..(144): Ceres Seq. ID no. 13601961

SEQ ID NO: 110254 - DNA, 1295 bp, Arabidopsis thaliana; identical to SEQ ID NO: 99015
  misc_feature (1)..(1295): Ceres Seq. ID no. 13601962
  misc_feature (1)..(1295): Ortholog of  Ceres SEQ ID NO 14308080 as cited in SEQ ID NO 55218
  misc_feature (1)..(1295): Ortholog of  Ceres SEQ ID NO 14309287 as cited in SEQ ID NO 0

SEQ ID NO: 110255 - protein, 271 aa, Arabidopsis thaliana; identical to SEQ ID NO: 99016
  peptide (1)..(271): Ceres Seq. ID no. 13601963

SEQ ID NO: 110256 - protein, 226 aa, Arabidopsis thaliana; identical to SEQ ID NO: 72076
  peptide (1)..(226): Ceres Seq. ID no. 13601964

SEQ ID NO: 110257 - protein, 217 aa, Arabidopsis thaliana; identical to SEQ ID NO: 72077
  peptide (1)..(217): Ceres Seq. ID no. 13601965

SEQ ID NO: 110258 - DNA, 620 bp, Arabidopsis thaliana; identical to SEQ ID NO: 99019
  misc_feature (1)..(620): Ceres Seq. ID no. 13601973
  misc_feature (1)..(620): Ortholog of  Ceres SEQ ID NO 15174240 as cited in SEQ ID NO 61866

SEQ ID NO: 110259 - protein, 154 aa, Arabidopsis thaliana; identical to SEQ ID NO: 99020
  peptide (1)..(154): Ceres Seq. ID no. 13601974

SEQ ID NO: 110260 - protein, 77 aa, Arabidopsis thaliana; identical to SEQ ID NO: 99021
  peptide (1)..(77): Ceres Seq. ID no. 13601975

SEQ ID NO: 110261 - DNA, 1967 bp, Arabidopsis thaliana; identical to SEQ ID NO: 99022
  misc_feature (1)..(1967): Ceres Seq. ID no. 13601976
  misc_feature (1)..(1967): Ortholog of  Ceres SEQ ID NO 14309715 as cited in SEQ ID NO 55353
  misc_feature (1)..(1967): Ortholog of  Ceres SEQ ID NO 13595521 as cited in SEQ ID NO 59840

SEQ ID NO: 110262 - protein, 598 aa, Arabidopsis thaliana; identical to SEQ ID NO: 99023
  peptide (1)..(598): Ceres Seq. ID no. 13601977

SEQ ID NO: 110263 - protein, 556 aa, Arabidopsis thaliana; identical to SEQ ID NO: 40206
  peptide (1)..(556): Ceres Seq. ID no. 13601978

SEQ ID NO: 110264 - protein, 484 aa, Arabidopsis thaliana; identical to SEQ ID NO: 40207
  peptide (1)..(484): Ceres Seq. ID no. 13601979

SEQ ID NO: 110265 - DNA, 1324 bp, Arabidopsis thaliana; identical to SEQ ID NO: 99026
  misc_feature (1)..(1324): Ceres Seq. ID no. 13601987
  misc_feature (1)..(1324): Ortholog of  Ceres SEQ ID NO 15179641 as cited in SEQ ID NO 56414
  misc_feature (1)..(1324): Ortholog of  Ceres SEQ ID NO 14316049 as cited in SEQ ID NO 67036
  misc_feature (1)..(1324): Ortholog of  Ceres SEQ ID NO 14302220 as cited in SEQ ID NO 69121

SEQ ID NO: 110266 - protein, 364 aa, Arabidopsis thaliana; identical to SEQ ID NO: 99027
  peptide (1)..(364): Ceres Seq. ID no. 13601988

SEQ ID NO: 110267 - protein, 338 aa, Arabidopsis thaliana; identical to SEQ ID NO: 23957
  peptide (1)..(338): Ceres Seq. ID no. 13601989

SEQ ID NO: 110268 - protein, 294 aa, Arabidopsis thaliana; identical to SEQ ID NO: 23958
  peptide (1)..(294): Ceres Seq. ID no. 13601990

SEQ ID NO: 110269 - DNA, 1515 bp, Arabidopsis thaliana; identical to SEQ ID NO: 99030
  misc_feature (1)..(1515): Ceres Seq. ID no. 13602011
  misc_feature (1)..(1515): Ortholog of  Ceres SEQ ID NO 14314264 as cited in SEQ ID NO 57374

SEQ ID NO: 110270 - protein, 462 aa, Arabidopsis thaliana; identical to SEQ ID NO: 42935
  peptide (1)..(462): Ceres Seq. ID no. 13602012

SEQ ID NO: 110271 - protein, 449 aa, Arabidopsis thaliana; identical to SEQ ID NO: 42936
  peptide (1)..(449): Ceres Seq. ID no. 13602013

SEQ ID NO: 110272 - protein, 406 aa, Arabidopsis thaliana; identical to SEQ ID NO: 42937
  peptide (1)..(406): Ceres Seq. ID no. 13602014

SEQ ID NO: 110273 - DNA, 1486 bp, Arabidopsis thaliana; identical to SEQ ID NO: 99034
  misc_feature (1)..(1486): Ceres Seq. ID no. 13602015
  misc_feature (1)..(1486): Ortholog of  Ceres SEQ ID NO 13596013 as cited in SEQ ID NO 61990

SEQ ID NO: 110274 - protein, 440 aa, Arabidopsis thaliana; identical to SEQ ID NO: 99035
  peptide (1)..(440): Ceres Seq. ID no. 13602016

SEQ ID NO: 110275 - protein, 402 aa, Arabidopsis thaliana; identical to SEQ ID NO: 41624
  peptide (1)..(402): Ceres Seq. ID no. 13602017

SEQ ID NO: 110276 - protein, 292 aa, Arabidopsis thaliana; identical to SEQ ID NO: 41625
  peptide (1)..(292): Ceres Seq. ID no. 13602018

SEQ ID NO: 110277 - DNA, 1217 bp, Arabidopsis thaliana; identical to SEQ ID NO: 99038
  misc_feature (1)..(1217): Ceres Seq. ID no. 13602019
  misc_feature (1)..(1217): Ortholog of  Ceres SEQ ID NO 15176423 as cited in SEQ ID NO 53228

SEQ ID NO: 110278 - protein, 332 aa, Arabidopsis thaliana; identical to SEQ ID NO: 99039
  peptide (1)..(332): Ceres Seq. ID no. 13602020

SEQ ID NO: 110279 - protein, 287 aa, Arabidopsis thaliana; identical to SEQ ID NO: 99040
  peptide (1)..(287): Ceres Seq. ID no. 13602021

SEQ ID NO: 110280 - protein, 278 aa, Arabidopsis thaliana; identical to SEQ ID NO: 99041
  peptide (1)..(278): Ceres Seq. ID no. 13602022

SEQ ID NO: 110281 - DNA, 885 bp, Arabidopsis thaliana; identical to SEQ ID NO: 99042
  misc_feature (1)..(885): Ceres Seq. ID no. 13602023
  misc_feature (1)..(885): Ortholog of  Ceres SEQ ID NO 13591265 as cited in SEQ ID NO 61046
  misc_feature (1)..(885): Ortholog of  Ceres SEQ ID NO 15224932 as cited in SEQ ID NO 62225

SEQ ID NO: 110282 - protein, 253 aa, Arabidopsis thaliana; identical to SEQ ID NO: 99043
  peptide (1)..(253): Ceres Seq. ID no. 13602024

SEQ ID NO: 110283 - protein, 212 aa, Arabidopsis thaliana; identical to SEQ ID NO: 28152
  peptide (1)..(212): Ceres Seq. ID no. 13602025

SEQ ID NO: 110284 - DNA, 1105 bp, Arabidopsis thaliana; identical to SEQ ID NO: 99045
  misc_feature (1)..(1105): Ceres Seq. ID no. 13602030
  misc_feature (1)..(1105): Ortholog of  Ceres SEQ ID NO 13596902 as cited in SEQ ID NO 62521

SEQ ID NO: 110285 - protein, 314 aa, Arabidopsis thaliana; identical to SEQ ID NO: 40986
  peptide (1)..(314): Ceres Seq. ID no. 13602031

SEQ ID NO: 110286 - protein, 310 aa, Arabidopsis thaliana; identical to SEQ ID NO: 40987
  peptide (1)..(310): Ceres Seq. ID no. 13602032

SEQ ID NO: 110287 - protein, 282 aa, Arabidopsis thaliana; identical to SEQ ID NO: 40988
  peptide (1)..(282): Ceres Seq. ID no. 13602033

SEQ ID NO: 110288 - DNA, 1220 bp, Arabidopsis thaliana; identical to SEQ ID NO: 99049
  misc_feature (1)..(1220): Ceres Seq. ID no. 13602061
  misc_feature (1)..(1220): Ortholog of  Ceres SEQ ID NO 14310369 as cited in SEQ ID NO 54765
  misc_feature (1)..(1220): Ortholog of  Ceres SEQ ID NO 13638746 as cited in SEQ ID NO 59296
  misc_feature (1)..(1220): Ortholog of  Ceres SEQ ID NO 13596474 as cited in SEQ ID NO 62169
  misc_feature (1)..(1220): Ortholog of  Ceres SEQ ID NO 13598714 as cited in SEQ ID NO 62656
  misc_feature (1)..(1220): Ortholog of  Ceres SEQ ID NO 13596969 as cited in SEQ ID NO 63375
  misc_feature (1)..(1220): Ortholog of  Ceres SEQ ID NO 14302434 as cited in SEQ ID NO 63410
  misc_feature (1)..(1220): Ortholog of  Ceres SEQ ID NO 13597519 as cited in SEQ ID NO 64759
  misc_feature (1)..(1220): Ortholog of  Ceres SEQ ID NO 13587054 as cited in SEQ ID NO 0

SEQ ID NO: 110289 - protein, 316 aa, Arabidopsis thaliana; identical to SEQ ID NO: 99050
  peptide (1)..(316): Ceres Seq. ID no. 13602062

SEQ ID NO: 110290 - protein, 309 aa, Arabidopsis thaliana; identical to SEQ ID NO: 99051
  peptide (1)..(309): Ceres Seq. ID no. 13602063

SEQ ID NO: 110291 - protein, 308 aa, Arabidopsis thaliana; identical to SEQ ID NO: 99052
  peptide (1)..(308): Ceres Seq. ID no. 13602064

SEQ ID NO: 110292 - DNA, 956 bp, Arabidopsis thaliana; identical to SEQ ID NO: 99053
  misc_feature (1)..(956): Ceres Seq. ID no. 13602069
  misc_feature (1)..(956): Ortholog of  Ceres SEQ ID NO 14306138 as cited in SEQ ID NO 57513

SEQ ID NO: 110293 - protein, 181 aa, Arabidopsis thaliana; identical to SEQ ID NO: 38473
  peptide (1)..(181): Ceres Seq. ID no. 13602070

SEQ ID NO: 110294 - DNA, 1019 bp, Arabidopsis thaliana; identical to SEQ ID NO: 99055
  misc_feature (1)..(1019): Ceres Seq. ID no. 13602082
  misc_feature (1)..(1019): Ortholog of  Ceres SEQ ID NO 15180793 as cited in SEQ ID NO 0

SEQ ID NO: 110295 - protein, 300 aa, Arabidopsis thaliana; identical to SEQ ID NO: 28639
  peptide (1)..(300): Ceres Seq. ID no. 13602083

SEQ ID NO: 110296 - protein, 289 aa, Arabidopsis thaliana; identical to SEQ ID NO: 28640
  peptide (1)..(289): Ceres Seq. ID no. 13602084

SEQ ID NO: 110297 - protein, 286 aa, Arabidopsis thaliana; identical to SEQ ID NO: 28641
  peptide (1)..(286): Ceres Seq. ID no. 13602085

SEQ ID NO: 110298 - DNA, 1243 bp, Arabidopsis thaliana; identical to SEQ ID NO: 99059
  misc_feature (1)..(1243): Ceres Seq. ID no. 13602090
  misc_feature (1)..(1243): Ortholog of  Ceres SEQ ID NO 14302776 as cited in SEQ ID NO 66919

SEQ ID NO: 110299 - protein, 305 aa, Arabidopsis thaliana; identical to SEQ ID NO: 37846
  peptide (1)..(305): Ceres Seq. ID no. 13602091

SEQ ID NO: 110300 - DNA, 870 bp, Arabidopsis thaliana; identical to SEQ ID NO: 99061
  misc_feature (1)..(870): Ceres Seq. ID no. 13602092
  misc_feature (1)..(870): Ortholog of  Ceres SEQ ID NO 15174145 as cited in SEQ ID NO 0

SEQ ID NO: 110301 - protein, 195 aa, Arabidopsis thaliana; identical to SEQ ID NO: 25018
  peptide (1)..(195): Ceres Seq. ID no. 13602093

SEQ ID NO: 110302 - protein, 170 aa, Arabidopsis thaliana; identical to SEQ ID NO: 25019
  peptide (1)..(170): Ceres Seq. ID no. 13602094

SEQ ID NO: 110303 - protein, 165 aa, Arabidopsis thaliana; identical to SEQ ID NO: 25020
  peptide (1)..(165): Ceres Seq. ID no. 13602095

SEQ ID NO: 110304 - DNA, 574 bp, Arabidopsis thaliana; identical to SEQ ID NO: 99065
  misc_feature (1)..(574): Ceres Seq. ID no. 13602096
  misc_feature (1)..(574): Ortholog of  Ceres SEQ ID NO 15174145 as cited in SEQ ID NO 0

SEQ ID NO: 110305 - protein, 163 aa, Arabidopsis thaliana; identical to SEQ ID NO: 99066
  peptide (1)..(163): Ceres Seq. ID no. 13602097

SEQ ID NO: 110306 - protein, 151 aa, Arabidopsis thaliana; identical to SEQ ID NO: 99067
  peptide (1)..(151): Ceres Seq. ID no. 13602098

SEQ ID NO: 110307 - protein, 148 aa, Arabidopsis thaliana; identical to SEQ ID NO: 99068
  peptide (1)..(148): Ceres Seq. ID no. 13602099

SEQ ID NO: 110308 - DNA, 1432 bp, Arabidopsis thaliana; identical to SEQ ID NO: 99069
  misc_feature (1)..(1432): Ceres Seq. ID no. 13602108
  misc_feature (1)..(1432): Ortholog of  Ceres SEQ ID NO 13596392 as cited in SEQ ID NO 62136
  misc_feature (1)..(1432): Ortholog of  Ceres SEQ ID NO 13654360 as cited in SEQ ID NO 67980
  misc_feature (1)..(1432): Ortholog of  Ceres SEQ ID NO 13596394 as cited in SEQ ID NO 68561

SEQ ID NO: 110309 - protein, 312 aa, Arabidopsis thaliana; identical to SEQ ID NO: 27497
  peptide (1)..(312): Ceres Seq. ID no. 13602109

SEQ ID NO: 110310 - protein, 304 aa, Arabidopsis thaliana; identical to SEQ ID NO: 27498
  peptide (1)..(304): Ceres Seq. ID no. 13602110

SEQ ID NO: 110311 - protein, 278 aa, Arabidopsis thaliana; identical to SEQ ID NO: 27499
  peptide (1)..(278): Ceres Seq. ID no. 13602111

SEQ ID NO: 110312 - DNA, 820 bp, Arabidopsis thaliana; identical to SEQ ID NO: 99073
  misc_feature (1)..(820): Ceres Seq. ID no. 13602112
  misc_feature (1)..(820): Ortholog of  Ceres SEQ ID NO 12585335 as cited in SEQ ID NO 62940

SEQ ID NO: 110313 - protein, 176 aa, Arabidopsis thaliana; identical to SEQ ID NO: 37236
  peptide (1)..(176): Ceres Seq. ID no. 13602113

SEQ ID NO: 110314 - protein, 166 aa, Arabidopsis thaliana; identical to SEQ ID NO: 37237
  peptide (1)..(166): Ceres Seq. ID no. 13602114

SEQ ID NO: 110315 - protein, 146 aa, Arabidopsis thaliana; identical to SEQ ID NO: 37238
  peptide (1)..(146): Ceres Seq. ID no. 13602115

SEQ ID NO: 110316 - DNA, 1340 bp, Arabidopsis thaliana; identical to SEQ ID NO: 99077
  misc_feature (1)..(1340): Ceres Seq. ID no. 13602116
  misc_feature (1)..(1340): Ortholog of  Ceres SEQ ID NO 15226004 as cited in SEQ ID NO 56808

SEQ ID NO: 110317 - protein, 287 aa, Arabidopsis thaliana; identical to SEQ ID NO: 42567
  peptide (1)..(287): Ceres Seq. ID no. 13602117

SEQ ID NO: 110318 - protein, 274 aa, Arabidopsis thaliana; identical to SEQ ID NO: 42568
  peptide (1)..(274): Ceres Seq. ID no. 13602118

SEQ ID NO: 110319 - protein, 202 aa, Arabidopsis thaliana; identical to SEQ ID NO: 42569
  peptide (1)..(202): Ceres Seq. ID no. 13602119

SEQ ID NO: 110320 - DNA, 1724 bp, Arabidopsis thaliana; identical to SEQ ID NO: 99081
  misc_feature (1)..(1724): Ceres Seq. ID no. 13602132
  misc_feature (1)..(1724): Ortholog of  Ceres SEQ ID NO 15170666 as cited in SEQ ID NO 63386

SEQ ID NO: 110321 - protein, 457 aa, Arabidopsis thaliana; identical to SEQ ID NO: 21784
  peptide (1)..(457): Ceres Seq. ID no. 13602133

SEQ ID NO: 110322 - protein, 442 aa, Arabidopsis thaliana; identical to SEQ ID NO: 21785
  peptide (1)..(442): Ceres Seq. ID no. 13602134

SEQ ID NO: 110323 - protein, 436 aa, Arabidopsis thaliana; identical to SEQ ID NO: 21786
  peptide (1)..(436): Ceres Seq. ID no. 13602135

SEQ ID NO: 110324 - DNA, 2234 bp, Arabidopsis thaliana; identical to SEQ ID NO: 99085
  misc_feature (1)..(2234): Ceres Seq. ID no. 13602136
  misc_feature (1)..(2234): Ortholog of  Ceres SEQ ID NO 13659394 as cited in SEQ ID NO 67049

SEQ ID NO: 110325 - protein, 610 aa, Arabidopsis thaliana; identical to SEQ ID NO: 37968
  peptide (1)..(610): Ceres Seq. ID no. 13602137

SEQ ID NO: 110326 - protein, 543 aa, Arabidopsis thaliana; identical to SEQ ID NO: 37969
  peptide (1)..(543): Ceres Seq. ID no. 13602138

SEQ ID NO: 110327 - protein, 541 aa, Arabidopsis thaliana; identical to SEQ ID NO: 37970
  peptide (1)..(541): Ceres Seq. ID no. 13602139

SEQ ID NO: 110328 - DNA, 1453 bp, Arabidopsis thaliana; identical to SEQ ID NO: 99089
  misc_feature (1)..(1453): Ceres Seq. ID no. 13602144
  misc_feature (1)..(1453): Ortholog of  Ceres SEQ ID NO 14311667 as cited in SEQ ID NO 58070

SEQ ID NO: 110329 - protein, 396 aa, Arabidopsis thaliana; identical to SEQ ID NO: 24664
  peptide (1)..(396): Ceres Seq. ID no. 13602145

SEQ ID NO: 110330 - protein, 295 aa, Arabidopsis thaliana; identical to SEQ ID NO: 24665
  peptide (1)..(295): Ceres Seq. ID no. 13602146

SEQ ID NO: 110331 - protein, 283 aa, Arabidopsis thaliana; identical to SEQ ID NO: 24666
  peptide (1)..(283): Ceres Seq. ID no. 13602147

SEQ ID NO: 110332 - DNA, 1633 bp, Arabidopsis thaliana; identical to SEQ ID NO: 99093
  misc_feature (1)..(1633): Ceres Seq. ID no. 13602150
  misc_feature (1)..(1633): Ortholog of  Ceres SEQ ID NO 14303866 as cited in SEQ ID NO 53689
  misc_feature (1)..(1633): Ortholog of  Ceres SEQ ID NO 14315958 as cited in SEQ ID NO 59979
  misc_feature (1)..(1633): Ortholog of  Ceres SEQ ID NO 13597037 as cited in SEQ ID NO 69005

SEQ ID NO: 110333 - protein, 512 aa, Arabidopsis thaliana; identical to SEQ ID NO: 99094
  peptide (1)..(512): Ceres Seq. ID no. 13602151

SEQ ID NO: 110334 - protein, 407 aa, Arabidopsis thaliana; identical to SEQ ID NO: 35169
  peptide (1)..(407): Ceres Seq. ID no. 13602152

SEQ ID NO: 110335 - protein, 262 aa, Arabidopsis thaliana; identical to SEQ ID NO: 35170
  peptide (1)..(262): Ceres Seq. ID no. 13602153

SEQ ID NO: 110336 - DNA, 965 bp, Arabidopsis thaliana; identical to SEQ ID NO: 99097
  misc_feature (1)..(965): Ceres Seq. ID no. 13602166
  misc_feature (1)..(965): Ortholog of  Ceres SEQ ID NO 12619999 as cited in SEQ ID NO 66123
  misc_feature (1)..(965): Ortholog of  Ceres SEQ ID NO 13656436 as cited in SEQ ID NO 69154

SEQ ID NO: 110337 - protein, 216 aa, Arabidopsis thaliana; identical to SEQ ID NO: 99098
  peptide (1)..(216): Ceres Seq. ID no. 13602167

SEQ ID NO: 110338 - protein, 128 aa, Arabidopsis thaliana; identical to SEQ ID NO: 99099
  peptide (1)..(128): Ceres Seq. ID no. 13602168

SEQ ID NO: 110339 - DNA, 910 bp, Arabidopsis thaliana; identical to SEQ ID NO: 99100
  misc_feature (1)..(910): Ceres Seq. ID no. 13602182
  misc_feature (1)..(910): Ortholog of  Ceres SEQ ID NO 15225111 as cited in SEQ ID NO 58444
  misc_feature (1)..(910): Ortholog of  Ceres SEQ ID NO 13661001 as cited in SEQ ID NO 67531
  misc_feature (1)..(910): Ortholog of  Ceres SEQ ID NO 15178920 as cited in SEQ ID NO 0

SEQ ID NO: 110340 - protein, 214 aa, Arabidopsis thaliana; identical to SEQ ID NO: 99101
  peptide (1)..(214): Ceres Seq. ID no. 13602183

SEQ ID NO: 110341 - protein, 191 aa, Arabidopsis thaliana; identical to SEQ ID NO: 99102
  peptide (1)..(191): Ceres Seq. ID no. 13602184

SEQ ID NO: 110342 - protein, 131 aa, Arabidopsis thaliana; identical to SEQ ID NO: 99103
  peptide (1)..(131): Ceres Seq. ID no. 13602185

SEQ ID NO: 110343 - DNA, 2026 bp, Arabidopsis thaliana; identical to SEQ ID NO: 99104
  misc_feature (1)..(2026): Ceres Seq. ID no. 13602192
  misc_feature (1)..(2026): Ortholog of  Ceres SEQ ID NO 13597798 as cited in SEQ ID NO 64311

SEQ ID NO: 110344 - protein, 630 aa, Arabidopsis thaliana; identical to SEQ ID NO: 99105
  peptide (1)..(630): Ceres Seq. ID no. 13602193

SEQ ID NO: 110345 - protein, 578 aa, Arabidopsis thaliana; identical to SEQ ID NO: 99106
  peptide (1)..(578): Ceres Seq. ID no. 13602194

SEQ ID NO: 110346 - protein, 570 aa, Arabidopsis thaliana; identical to SEQ ID NO: 99107
  peptide (1)..(570): Ceres Seq. ID no. 13602195

SEQ ID NO: 110347 - DNA, 1128 bp, Arabidopsis thaliana; identical to SEQ ID NO: 99108
  misc_feature (1)..(1128): Ceres Seq. ID no. 13602196
  misc_feature (1)..(1128): Ortholog of  Ceres SEQ ID NO 15179499 as cited in SEQ ID NO 0

SEQ ID NO: 110348 - protein, 274 aa, Arabidopsis thaliana; identical to SEQ ID NO: 24362
  peptide (1)..(274): Ceres Seq. ID no. 13602197

SEQ ID NO: 110349 - protein, 251 aa, Arabidopsis thaliana; identical to SEQ ID NO: 24363
  peptide (1)..(251): Ceres Seq. ID no. 13602198

SEQ ID NO: 110350 - protein, 199 aa, Arabidopsis thaliana; identical to SEQ ID NO: 24364
  peptide (1)..(199): Ceres Seq. ID no. 13602199

SEQ ID NO: 110351 - DNA, 2010 bp, Arabidopsis thaliana; identical to SEQ ID NO: 99112
  misc_feature (1)..(2010): Ceres Seq. ID no. 13602208
  misc_feature (1)..(2010): Ortholog of  Ceres SEQ ID NO 14303201 as cited in SEQ ID NO 67304

SEQ ID NO: 110352 - protein, 586 aa, Arabidopsis thaliana; identical to SEQ ID NO: 99113
  peptide (1)..(586): Ceres Seq. ID no. 13602209

SEQ ID NO: 110353 - protein, 426 aa, Arabidopsis thaliana; identical to SEQ ID NO: 75248
  peptide (1)..(426): Ceres Seq. ID no. 13602210

SEQ ID NO: 110354 - protein, 377 aa, Arabidopsis thaliana; identical to SEQ ID NO: 75249
  peptide (1)..(377): Ceres Seq. ID no. 13602211

SEQ ID NO: 110355 - DNA, 1132 bp, Arabidopsis thaliana; identical to SEQ ID NO: 99116
  misc_feature (1)..(1132): Ceres Seq. ID no. 13602214
  misc_feature (1)..(1132): Ortholog of  Ceres SEQ ID NO 13638643 as cited in SEQ ID NO 52149

SEQ ID NO: 110356 - protein, 280 aa, Arabidopsis thaliana; identical to SEQ ID NO: 99117
  peptide (1)..(280): Ceres Seq. ID no. 13602215

SEQ ID NO: 110357 - protein, 202 aa, Arabidopsis thaliana; identical to SEQ ID NO: 23324
  peptide (1)..(202): Ceres Seq. ID no. 13602216

SEQ ID NO: 110358 - protein, 190 aa, Arabidopsis thaliana; identical to SEQ ID NO: 99119
  peptide (1)..(190): Ceres Seq. ID no. 13602217

SEQ ID NO: 110359 - DNA, 2547 bp, Arabidopsis thaliana; identical to SEQ ID NO: 99120
  misc_feature (1)..(2547): Ceres Seq. ID no. 13602236
  misc_feature (1)..(2547): Ortholog of  Ceres SEQ ID NO 14310620 as cited in SEQ ID NO 53662

SEQ ID NO: 110360 - protein, 820 aa, Arabidopsis thaliana; identical to SEQ ID NO: 99121
  peptide (1)..(820): Ceres Seq. ID no. 13602237

SEQ ID NO: 110361 - protein, 751 aa, Arabidopsis thaliana; identical to SEQ ID NO: 99122
  peptide (1)..(751): Ceres Seq. ID no. 13602238

SEQ ID NO: 110362 - protein, 736 aa, Arabidopsis thaliana; identical to SEQ ID NO: 99123
  peptide (1)..(736): Ceres Seq. ID no. 13602239

SEQ ID NO: 110363 - DNA, 918 bp, Arabidopsis thaliana; identical to SEQ ID NO: 99124
  misc_feature (1)..(918): Ceres Seq. ID no. 13602255
  misc_feature (1)..(918): Ortholog of  Ceres SEQ ID NO 13597213 as cited in SEQ ID NO 64578

SEQ ID NO: 110364 - protein, 256 aa, Arabidopsis thaliana; identical to SEQ ID NO: 35330
  peptide (1)..(256): Ceres Seq. ID no. 13602256

SEQ ID NO: 110365 - protein, 238 aa, Arabidopsis thaliana; identical to SEQ ID NO: 35331
  peptide (1)..(238): Ceres Seq. ID no. 13602257

SEQ ID NO: 110366 - DNA, 889 bp, Arabidopsis thaliana; identical to SEQ ID NO: 99127
  misc_feature (1)..(889): Ceres Seq. ID no. 13602258
  misc_feature (1)..(889): Ortholog of  Ceres SEQ ID NO 15173847 as cited in SEQ ID NO 61751

SEQ ID NO: 110367 - protein, 229 aa, Arabidopsis thaliana; identical to SEQ ID NO: 37303
  peptide (1)..(229): Ceres Seq. ID no. 13602259

SEQ ID NO: 110368 - protein, 192 aa, Arabidopsis thaliana; identical to SEQ ID NO: 37304
  peptide (1)..(192): Ceres Seq. ID no. 13602260

SEQ ID NO: 110369 - DNA, 1224 bp, Arabidopsis thaliana; identical to SEQ ID NO: 99130
  misc_feature (1)..(1224): Ceres Seq. ID no. 13602265
  misc_feature (1)..(1224): Ortholog of  Ceres SEQ ID NO 15177842 as cited in SEQ ID NO 51547
  misc_feature (1)..(1224): Ortholog of  Ceres SEQ ID NO 13594859 as cited in SEQ ID NO 51974
  misc_feature (1)..(1224): Ortholog of  Ceres SEQ ID NO 13597887 as cited in SEQ ID NO 64295

SEQ ID NO: 110370 - protein, 258 aa, Arabidopsis thaliana; identical to SEQ ID NO: 99131
  peptide (1)..(258): Ceres Seq. ID no. 13602266

SEQ ID NO: 110371 - protein, 189 aa, Arabidopsis thaliana; identical to SEQ ID NO: 99132
  peptide (1)..(189): Ceres Seq. ID no. 13602267

SEQ ID NO: 110372 - protein, 161 aa, Arabidopsis thaliana; identical to SEQ ID NO: 99133
  peptide (1)..(161): Ceres Seq. ID no. 13602268

SEQ ID NO: 110373 - DNA, 761 bp, Arabidopsis thaliana; identical to SEQ ID NO: 99134
  misc_feature (1)..(761): Ceres Seq. ID no. 13602269
  misc_feature (1)..(761): Ortholog of  Ceres SEQ ID NO 15169037 as cited in SEQ ID NO 58715
  misc_feature (1)..(761): Ortholog of  Ceres SEQ ID NO 15224680 as cited in SEQ ID NO 59829

SEQ ID NO: 110374 - protein, 164 aa, Arabidopsis thaliana; identical to SEQ ID NO: 41836
  peptide (1)..(164): Ceres Seq. ID no. 13602270

SEQ ID NO: 110375 - protein, 147 aa, Arabidopsis thaliana; identical to SEQ ID NO: 41837
  peptide (1)..(147): Ceres Seq. ID no. 13602271

SEQ ID NO: 110376 - protein, 140 aa, Arabidopsis thaliana; identical to SEQ ID NO: 41838
  peptide (1)..(140): Ceres Seq. ID no. 13602272

SEQ ID NO: 110377 - DNA, 2079 bp, Arabidopsis thaliana; identical to SEQ ID NO: 99138
  misc_feature (1)..(2079): Ceres Seq. ID no. 13602273
  misc_feature (1)..(2079): Ortholog of  Ceres SEQ ID NO 14313636 as cited in SEQ ID NO 64205

SEQ ID NO: 110378 - protein, 591 aa, Arabidopsis thaliana; identical to SEQ ID NO: 99139
  peptide (1)..(591): Ceres Seq. ID no. 13602274

SEQ ID NO: 110379 - protein, 411 aa, Arabidopsis thaliana; identical to SEQ ID NO: 41018
  peptide (1)..(411): Ceres Seq. ID no. 13602275

SEQ ID NO: 110380 - protein, 352 aa, Arabidopsis thaliana; identical to SEQ ID NO: 41019
  peptide (1)..(352): Ceres Seq. ID no. 13602276

SEQ ID NO: 110381 - DNA, 1122 bp, Arabidopsis thaliana; identical to SEQ ID NO: 99142
  misc_feature (1)..(1122): Ceres Seq. ID no. 13602281
  misc_feature (1)..(1122): Ortholog of  Ceres SEQ ID NO 13655193 as cited in SEQ ID NO 62745

SEQ ID NO: 110382 - protein, 313 aa, Arabidopsis thaliana; identical to SEQ ID NO: 26446
  peptide (1)..(313): Ceres Seq. ID no. 13602282

SEQ ID NO: 110383 - protein, 304 aa, Arabidopsis thaliana; identical to SEQ ID NO: 26447
  peptide (1)..(304): Ceres Seq. ID no. 13602283

SEQ ID NO: 110384 - protein, 214 aa, Arabidopsis thaliana; identical to SEQ ID NO: 26448
  peptide (1)..(214): Ceres Seq. ID no. 13602284

SEQ ID NO: 110385 - DNA, 1359 bp, Arabidopsis thaliana; identical to SEQ ID NO: 99146
  misc_feature (1)..(1359): Ceres Seq. ID no. 13602285
  misc_feature (1)..(1359): Ortholog of  Ceres SEQ ID NO 14308615 as cited in SEQ ID NO 58538
  misc_feature (1)..(1359): Ortholog of  Ceres SEQ ID NO 13585342 as cited in SEQ ID NO 63601
  misc_feature (1)..(1359): Ortholog of  Ceres SEQ ID NO 15177459 as cited in SEQ ID NO 0

SEQ ID NO: 110386 - protein, 386 aa, Arabidopsis thaliana; identical to SEQ ID NO: 99147
  peptide (1)..(386): Ceres Seq. ID no. 13602286

SEQ ID NO: 110387 - protein, 364 aa, Arabidopsis thaliana; identical to SEQ ID NO: 99148
  peptide (1)..(364): Ceres Seq. ID no. 13602287

SEQ ID NO: 110388 - protein, 252 aa, Arabidopsis thaliana; identical to SEQ ID NO: 99149
  peptide (1)..(252): Ceres Seq. ID no. 13602288

SEQ ID NO: 110389 - DNA, 1328 bp, Arabidopsis thaliana; identical to SEQ ID NO: 99150
  misc_feature (1)..(1328): Ceres Seq. ID no. 13602292
  misc_feature (1)..(1328): Ortholog of  Ceres SEQ ID NO 12611971 as cited in SEQ ID NO 53205
  misc_feature (1)..(1328): Ortholog of  Ceres SEQ ID NO 12615976 as cited in SEQ ID NO 62440

SEQ ID NO: 110390 - protein, 336 aa, Arabidopsis thaliana; identical to SEQ ID NO: 26357
  peptide (1)..(336): Ceres Seq. ID no. 13602293

SEQ ID NO: 110391 - protein, 332 aa, Arabidopsis thaliana; identical to SEQ ID NO: 26358
  peptide (1)..(332): Ceres Seq. ID no. 13602294

SEQ ID NO: 110392 - protein, 301 aa, Arabidopsis thaliana; identical to SEQ ID NO: 26359
  peptide (1)..(301): Ceres Seq. ID no. 13602295

SEQ ID NO: 110393 - DNA, 2763 bp, Arabidopsis thaliana; identical to SEQ ID NO: 99154
  misc_feature (1)..(2763): Ceres Seq. ID no. 13602300
  misc_feature (1)..(2763): Ortholog of  Ceres SEQ ID NO 13598926 as cited in SEQ ID NO 0

SEQ ID NO: 110394 - protein, 873 aa, Arabidopsis thaliana; identical to SEQ ID NO: 27072
  peptide (1)..(873): Ceres Seq. ID no. 13602301

SEQ ID NO: 110395 - protein, 858 aa, Arabidopsis thaliana; identical to SEQ ID NO: 27073
  peptide (1)..(858): Ceres Seq. ID no. 13602302

SEQ ID NO: 110396 - protein, 721 aa, Arabidopsis thaliana; identical to SEQ ID NO: 27074
  peptide (1)..(721): Ceres Seq. ID no. 13602303

SEQ ID NO: 110397 - DNA, 1544 bp, Arabidopsis thaliana; identical to SEQ ID NO: 99158
  misc_feature (1)..(1544): Ceres Seq. ID no. 13602304
  misc_feature (1)..(1544): Ortholog of  Ceres SEQ ID NO 15177285 as cited in SEQ ID NO 52481
  misc_feature (1)..(1544): Ortholog of  Ceres SEQ ID NO 13594068 as cited in SEQ ID NO 58624

SEQ ID NO: 110398 - protein, 436 aa, Arabidopsis thaliana; identical to SEQ ID NO: 34897
  peptide (1)..(436): Ceres Seq. ID no. 13602305

SEQ ID NO: 110399 - protein, 383 aa, Arabidopsis thaliana; identical to SEQ ID NO: 34898
  peptide (1)..(383): Ceres Seq. ID no. 13602306

SEQ ID NO: 110400 - protein, 317 aa, Arabidopsis thaliana; identical to SEQ ID NO: 34899
  peptide (1)..(317): Ceres Seq. ID no. 13602307

SEQ ID NO: 110401 - DNA, 1042 bp, Arabidopsis thaliana; identical to SEQ ID NO: 99162
  misc_feature (1)..(1042): Ceres Seq. ID no. 13602312
  misc_feature (1)..(1042): Ortholog of  Ceres SEQ ID NO 15174082 as cited in SEQ ID NO 61896
  misc_feature (1)..(1042): Ortholog of  Ceres SEQ ID NO 13655598 as cited in SEQ ID NO 64077
  misc_feature (1)..(1042): Ortholog of  Ceres SEQ ID NO 15179351 as cited in SEQ ID NO 0
  misc_feature (1)..(1042): Ortholog of  Ceres SEQ ID NO 15180408 as cited in SEQ ID NO 0

SEQ ID NO: 110402 - protein, 251 aa, Arabidopsis thaliana; identical to SEQ ID NO: 99163
  peptide (1)..(251): Ceres Seq. ID no. 13602313

SEQ ID NO: 110403 - protein, 210 aa, Arabidopsis thaliana; identical to SEQ ID NO: 99164
  peptide (1)..(210): Ceres Seq. ID no. 13602314

SEQ ID NO: 110404 - DNA, 1666 bp, Arabidopsis thaliana; identical to SEQ ID NO: 99165
  misc_feature (1)..(1666): Ceres Seq. ID no. 13602319
  misc_feature (1)..(1666): Ortholog of  Ceres SEQ ID NO 14314559 as cited in SEQ ID NO 52317
  misc_feature (1)..(1666): Ortholog of  Ceres SEQ ID NO 15174571 as cited in SEQ ID NO 53570
  misc_feature (1)..(1666): Ortholog of  Ceres SEQ ID NO 14314367 as cited in SEQ ID NO 57446

SEQ ID NO: 110405 - protein, 441 aa, Arabidopsis thaliana; identical to SEQ ID NO: 29210
  peptide (1)..(441): Ceres Seq. ID no. 13602320

SEQ ID NO: 110406 - protein, 390 aa, Arabidopsis thaliana; identical to SEQ ID NO: 29211
  peptide (1)..(390): Ceres Seq. ID no. 13602321

SEQ ID NO: 110407 - protein, 341 aa, Arabidopsis thaliana; identical to SEQ ID NO: 29212
  peptide (1)..(341): Ceres Seq. ID no. 13602322

SEQ ID NO: 110408 - DNA, 4276 bp, Arabidopsis thaliana; identical to SEQ ID NO: 99169
  misc_feature (1)..(4276): Ceres Seq. ID no. 13602335
  misc_feature (1)..(4276): Ortholog of  Ceres SEQ ID NO 15179695 as cited in SEQ ID NO 193

SEQ ID NO: 110409 - protein, 1286 aa, Arabidopsis thaliana; identical to SEQ ID NO: 99170
  peptide (1)..(1286): Ceres Seq. ID no. 13602336

SEQ ID NO: 110410 - protein, 1243 aa, Arabidopsis thaliana; identical to SEQ ID NO: 99171
  peptide (1)..(1243): Ceres Seq. ID no. 13602337

SEQ ID NO: 110411 - protein, 1205 aa, Arabidopsis thaliana; identical to SEQ ID NO: 99172
  peptide (1)..(1205): Ceres Seq. ID no. 13602338

SEQ ID NO: 110412 - DNA, 1340 bp, Arabidopsis thaliana; identical to SEQ ID NO: 99173
  misc_feature (1)..(1340): Ceres Seq. ID no. 13602339
  misc_feature (1)..(1340): Ortholog of  Ceres SEQ ID NO 14310483 as cited in SEQ ID NO 58376
  misc_feature (1)..(1340): Ortholog of  Ceres SEQ ID NO 13654451 as cited in SEQ ID NO 67881

SEQ ID NO: 110413 - protein, 386 aa, Arabidopsis thaliana; identical to SEQ ID NO: 99174
  peptide (1)..(386): Ceres Seq. ID no. 13602340

SEQ ID NO: 110414 - protein, 329 aa, Arabidopsis thaliana; identical to SEQ ID NO: 99175
  peptide (1)..(329): Ceres Seq. ID no. 13602341

SEQ ID NO: 110415 - protein, 317 aa, Arabidopsis thaliana; identical to SEQ ID NO: 99176
  peptide (1)..(317): Ceres Seq. ID no. 13602342

SEQ ID NO: 110416 - DNA, 4432 bp, Arabidopsis thaliana; identical to SEQ ID NO: 99177
  misc_feature (1)..(4432): Ceres Seq. ID no. 13602347
  misc_feature (1)..(4432): Ortholog of  Ceres SEQ ID NO 14304848 as cited in SEQ ID NO 54575
  misc_feature (1)..(4432): Ortholog of  Ceres SEQ ID NO 12617447 as cited in SEQ ID NO 65185

SEQ ID NO: 110417 - protein, 1395 aa, Arabidopsis thaliana; identical to SEQ ID NO: 99178
  peptide (1)..(1395): Ceres Seq. ID no. 13602348

SEQ ID NO: 110418 - protein, 1372 aa, Arabidopsis thaliana; identical to SEQ ID NO: 99179
  peptide (1)..(1372): Ceres Seq. ID no. 13602349

SEQ ID NO: 110419 - protein, 1203 aa, Arabidopsis thaliana; identical to SEQ ID NO: 99180
  peptide (1)..(1203): Ceres Seq. ID no. 13602350

SEQ ID NO: 110420 - DNA, 1768 bp, Arabidopsis thaliana; identical to SEQ ID NO: 99181
  misc_feature (1)..(1768): Ceres Seq. ID no. 13602351
  misc_feature (1)..(1768): Ortholog of  Ceres SEQ ID NO 12327642 as cited in SEQ ID NO 20497

SEQ ID NO: 110421 - protein, 468 aa, Arabidopsis thaliana; identical to SEQ ID NO: 99182
  peptide (1)..(468): Ceres Seq. ID no. 13602352

SEQ ID NO: 110422 - protein, 259 aa, Arabidopsis thaliana; identical to SEQ ID NO: 99183
  peptide (1)..(259): Ceres Seq. ID no. 13602353

SEQ ID NO: 110423 - DNA, 1236 bp, Arabidopsis thaliana; identical to SEQ ID NO: 99184
  misc_feature (1)..(1236): Ceres Seq. ID no. 13602358
  misc_feature (1)..(1236): Ortholog of  Ceres SEQ ID NO 14308401 as cited in SEQ ID NO 55082

SEQ ID NO: 110424 - protein, 331 aa, Arabidopsis thaliana; identical to SEQ ID NO: 99185
  peptide (1)..(331): Ceres Seq. ID no. 13602359

SEQ ID NO: 110425 - protein, 322 aa, Arabidopsis thaliana; identical to SEQ ID NO: 99186
  peptide (1)..(322): Ceres Seq. ID no. 13602360

SEQ ID NO: 110426 - protein, 318 aa, Arabidopsis thaliana; identical to SEQ ID NO: 99187
  peptide (1)..(318): Ceres Seq. ID no. 13602361

SEQ ID NO: 110427 - DNA, 708 bp, Arabidopsis thaliana; identical to SEQ ID NO: 99188
  misc_feature (1)..(708): Ceres Seq. ID no. 13602365
  misc_feature (1)..(708): Ortholog of  Ceres SEQ ID NO 13595763 as cited in SEQ ID NO 57864

SEQ ID NO: 110428 - protein, 139 aa, Arabidopsis thaliana; identical to SEQ ID NO: 99189
  peptide (1)..(139): Ceres Seq. ID no. 13602366

SEQ ID NO: 110429 - protein, 134 aa, Arabidopsis thaliana; identical to SEQ ID NO: 99190
  peptide (1)..(134): Ceres Seq. ID no. 13602367

SEQ ID NO: 110430 - protein, 106 aa, Arabidopsis thaliana; identical to SEQ ID NO: 20994
  peptide (1)..(106): Ceres Seq. ID no. 13602368

SEQ ID NO: 110431 - DNA, 798 bp, Arabidopsis thaliana; identical to SEQ ID NO: 99192
  misc_feature (1)..(798): Ceres Seq. ID no. 13602383
  misc_feature (1)..(798): Ortholog of  Ceres SEQ ID NO 12610267 as cited in SEQ ID NO 51993
  misc_feature (1)..(798): Ortholog of  Ceres SEQ ID NO 13495070 as cited in SEQ ID NO 53216
  misc_feature (1)..(798): Ortholog of  Ceres SEQ ID NO 13661333 as cited in SEQ ID NO 61620
  misc_feature (1)..(798): Ortholog of  Ceres SEQ ID NO 13596812 as cited in SEQ ID NO 62283
  misc_feature (1)..(798): Ortholog of  Ceres SEQ ID NO 13623021 as cited in SEQ ID NO 0

SEQ ID NO: 110432 - protein, 143 aa, Arabidopsis thaliana; identical to SEQ ID NO: 36262
  peptide (1)..(143): Ceres Seq. ID no. 13602384

SEQ ID NO: 110433 - protein, 141 aa, Arabidopsis thaliana; identical to SEQ ID NO: 36263
  peptide (1)..(141): Ceres Seq. ID no. 13602385

SEQ ID NO: 110434 - protein, 137 aa, Arabidopsis thaliana; identical to SEQ ID NO: 36264
  peptide (1)..(137): Ceres Seq. ID no. 13602386

SEQ ID NO: 110435 - DNA, 780 bp, Arabidopsis thaliana; identical to SEQ ID NO: 99196
  misc_feature (1)..(780): Ceres Seq. ID no. 13602387
  misc_feature (1)..(780): Ortholog of  Ceres SEQ ID NO 13583898 as cited in SEQ ID NO 63147

SEQ ID NO: 110436 - protein, 137 aa, Arabidopsis thaliana; identical to SEQ ID NO: 99197
  peptide (1)..(137): Ceres Seq. ID no. 13602388

SEQ ID NO: 110437 - DNA, 807 bp, Arabidopsis thaliana; identical to SEQ ID NO: 99198
  misc_feature (1)..(807): Ceres Seq. ID no. 13602389
  misc_feature (1)..(807): Ortholog of  Ceres SEQ ID NO 13598227 as cited in SEQ ID NO 61591
  misc_feature (1)..(807): Ortholog of  Ceres SEQ ID NO 12584790 as cited in SEQ ID NO 62648

SEQ ID NO: 110438 - protein, 148 aa, Arabidopsis thaliana; identical to SEQ ID NO: 20896
  peptide (1)..(148): Ceres Seq. ID no. 13602390

SEQ ID NO: 110439 - protein, 119 aa, Arabidopsis thaliana; identical to SEQ ID NO: 20897
  peptide (1)..(119): Ceres Seq. ID no. 13602391

SEQ ID NO: 110440 - protein, 111 aa, Arabidopsis thaliana; identical to SEQ ID NO: 20898
  peptide (1)..(111): Ceres Seq. ID no. 13602392

SEQ ID NO: 110441 - DNA, 1333 bp, Arabidopsis thaliana; identical to SEQ ID NO: 99202
  misc_feature (1)..(1333): Ceres Seq. ID no. 13602401
  misc_feature (1)..(1333): Ortholog of  Ceres SEQ ID NO 14303843 as cited in SEQ ID NO 53775
  misc_feature (1)..(1333): Ortholog of  Ceres SEQ ID NO 15179800 as cited in SEQ ID NO 58215
  misc_feature (1)..(1333): Ortholog of  Ceres SEQ ID NO 13654549 as cited in SEQ ID NO 68530

SEQ ID NO: 110442 - protein, 372 aa, Arabidopsis thaliana; identical to SEQ ID NO: 99203
  peptide (1)..(372): Ceres Seq. ID no. 13602402

SEQ ID NO: 110443 - protein, 265 aa, Arabidopsis thaliana; identical to SEQ ID NO: 35535
  peptide (1)..(265): Ceres Seq. ID no. 13602403

SEQ ID NO: 110444 - DNA, 1156 bp, Arabidopsis thaliana; identical to SEQ ID NO: 99205
  misc_feature (1)..(1156): Ceres Seq. ID no. 13602404
  misc_feature (1)..(1156): Ortholog of  Ceres SEQ ID NO 15168549 as cited in SEQ ID NO 56976
  misc_feature (1)..(1156): Ortholog of  Ceres SEQ ID NO 14314335 as cited in SEQ ID NO 57305

SEQ ID NO: 110445 - protein, 278 aa, Arabidopsis thaliana; identical to SEQ ID NO: 99206
  peptide (1)..(278): Ceres Seq. ID no. 13602405

SEQ ID NO: 110446 - protein, 253 aa, Arabidopsis thaliana; identical to SEQ ID NO: 99207
  peptide (1)..(253): Ceres Seq. ID no. 13602406

SEQ ID NO: 110447 - protein, 198 aa, Arabidopsis thaliana; identical to SEQ ID NO: 23386
  peptide (1)..(198): Ceres Seq. ID no. 13602407

SEQ ID NO: 110448 - DNA, 1334 bp, Arabidopsis thaliana; identical to SEQ ID NO: 99209
  misc_feature (1)..(1334): Ceres Seq. ID no. 13602415
  misc_feature (1)..(1334): Ortholog of  Ceres SEQ ID NO 13596189 as cited in SEQ ID NO 68452

SEQ ID NO: 110449 - protein, 370 aa, Arabidopsis thaliana; identical to SEQ ID NO: 26642
  peptide (1)..(370): Ceres Seq. ID no. 13602416

SEQ ID NO: 110450 - protein, 246 aa, Arabidopsis thaliana; identical to SEQ ID NO: 26643
  peptide (1)..(246): Ceres Seq. ID no. 13602417

SEQ ID NO: 110451 - protein, 244 aa, Arabidopsis thaliana; identical to SEQ ID NO: 26644
  peptide (1)..(244): Ceres Seq. ID no. 13602418

SEQ ID NO: 110452 - DNA, 1189 bp, Arabidopsis thaliana; identical to SEQ ID NO: 99213
  misc_feature (1)..(1189): Ceres Seq. ID no. 13602419
  misc_feature (1)..(1189): Ortholog of  Ceres SEQ ID NO 12612470 as cited in SEQ ID NO 55136
  misc_feature (1)..(1189): Ortholog of  Ceres SEQ ID NO 12612425 as cited in SEQ ID NO 56789
  misc_feature (1)..(1189): Ortholog of  Ceres SEQ ID NO 13503512 as cited in SEQ ID NO 65121

SEQ ID NO: 110453 - protein, 378 aa, Arabidopsis thaliana; identical to SEQ ID NO: 99214
  peptide (1)..(378): Ceres Seq. ID no. 13602420

SEQ ID NO: 110454 - protein, 361 aa, Arabidopsis thaliana; identical to SEQ ID NO: 99215
  peptide (1)..(361): Ceres Seq. ID no. 13602421

SEQ ID NO: 110455 - DNA, 1332 bp, Arabidopsis thaliana; identical to SEQ ID NO: 99216
  misc_feature (1)..(1332): Ceres Seq. ID no. 13602422
  misc_feature (1)..(1332): Ortholog of  Ceres SEQ ID NO 12612470 as cited in SEQ ID NO 55136
  misc_feature (1)..(1332): Ortholog of  Ceres SEQ ID NO 12612425 as cited in SEQ ID NO 56789
  misc_feature (1)..(1332): Ortholog of  Ceres SEQ ID NO 13503512 as cited in SEQ ID NO 65121

SEQ ID NO: 110456 - protein, 367 aa, Arabidopsis thaliana; identical to SEQ ID NO: 26365
  peptide (1)..(367): Ceres Seq. ID no. 13602423

SEQ ID NO: 110457 - protein, 361 aa, Arabidopsis thaliana; identical to SEQ ID NO: 26366
  peptide (1)..(361): Ceres Seq. ID no. 13602424

SEQ ID NO: 110458 - protein, 353 aa, Arabidopsis thaliana; identical to SEQ ID NO: 99219
  peptide (1)..(353): Ceres Seq. ID no. 13602425

SEQ ID NO: 110459 - DNA, 1847 bp, Arabidopsis thaliana; identical to SEQ ID NO: 99220
  misc_feature (1)..(1847): Ceres Seq. ID no. 13602430
  misc_feature (1)..(1847): Ortholog of  Ceres SEQ ID NO 15171040 as cited in SEQ ID NO 55332

SEQ ID NO: 110460 - protein, 499 aa, Arabidopsis thaliana; identical to SEQ ID NO: 24219
  peptide (1)..(499): Ceres Seq. ID no. 13602431

SEQ ID NO: 110461 - protein, 495 aa, Arabidopsis thaliana; identical to SEQ ID NO: 24220
  peptide (1)..(495): Ceres Seq. ID no. 13602432

SEQ ID NO: 110462 - protein, 275 aa, Arabidopsis thaliana; identical to SEQ ID NO: 24221
  peptide (1)..(275): Ceres Seq. ID no. 13602433

SEQ ID NO: 110463 - DNA, 1430 bp, Arabidopsis thaliana; identical to SEQ ID NO: 99224
  misc_feature (1)..(1430): Ceres Seq. ID no. 13602438
  misc_feature (1)..(1430): Ortholog of  Ceres SEQ ID NO 13655244 as cited in SEQ ID NO 62716

SEQ ID NO: 110464 - protein, 422 aa, Arabidopsis thaliana; identical to SEQ ID NO: 99225
  peptide (1)..(422): Ceres Seq. ID no. 13602439

SEQ ID NO: 110465 - protein, 413 aa, Arabidopsis thaliana; identical to SEQ ID NO: 99226
  peptide (1)..(413): Ceres Seq. ID no. 13602440

SEQ ID NO: 110466 - protein, 303 aa, Arabidopsis thaliana; identical to SEQ ID NO: 99227
  peptide (1)..(303): Ceres Seq. ID no. 13602441

SEQ ID NO: 110467 - DNA, 1098 bp, Arabidopsis thaliana; identical to SEQ ID NO: 99228
  misc_feature (1)..(1098): Ceres Seq. ID no. 13602446
  misc_feature (1)..(1098): Ortholog of  Ceres SEQ ID NO 15169809 as cited in SEQ ID NO 52839
  misc_feature (1)..(1098): Ortholog of  Ceres SEQ ID NO 15224302 as cited in SEQ ID NO 53942

SEQ ID NO: 110468 - protein, 226 aa, Arabidopsis thaliana; identical to SEQ ID NO: 23899
  peptide (1)..(226): Ceres Seq. ID no. 13602447

SEQ ID NO: 110469 - DNA, 874 bp, Arabidopsis thaliana; identical to SEQ ID NO: 99230
  misc_feature (1)..(874): Ceres Seq. ID no. 13602448
  misc_feature (1)..(874): Ortholog of  Ceres SEQ ID NO 15173118 as cited in SEQ ID NO 62952
  misc_feature (1)..(874): Ortholog of  Ceres SEQ ID NO 15180067 as cited in SEQ ID NO 0

SEQ ID NO: 110470 - protein, 230 aa, Arabidopsis thaliana; identical to SEQ ID NO: 99231
  peptide (1)..(230): Ceres Seq. ID no. 13602449

SEQ ID NO: 110471 - protein, 227 aa, Arabidopsis thaliana; identical to SEQ ID NO: 99232
  peptide (1)..(227): Ceres Seq. ID no. 13602450

SEQ ID NO: 110472 - protein, 220 aa, Arabidopsis thaliana; identical to SEQ ID NO: 99233
  peptide (1)..(220): Ceres Seq. ID no. 13602451

SEQ ID NO: 110473 - DNA, 1597 bp, Arabidopsis thaliana; identical to SEQ ID NO: 99234
  misc_feature (1)..(1597): Ceres Seq. ID no. 13602459
  misc_feature (1)..(1597): Ortholog of  Ceres SEQ ID NO 13587235 as cited in SEQ ID NO 0

SEQ ID NO: 110474 - protein, 447 aa, Arabidopsis thaliana; identical to SEQ ID NO: 99235
  peptide (1)..(447): Ceres Seq. ID no. 13602460

SEQ ID NO: 110475 - protein, 434 aa, Arabidopsis thaliana; identical to SEQ ID NO: 47913
  peptide (1)..(434): Ceres Seq. ID no. 13602461

SEQ ID NO: 110476 - protein, 428 aa, Arabidopsis thaliana; identical to SEQ ID NO: 99237
  peptide (1)..(428): Ceres Seq. ID no. 13602462

SEQ ID NO: 110477 - DNA, 1214 bp, Arabidopsis thaliana; identical to SEQ ID NO: 99238
  misc_feature (1)..(1214): Ceres Seq. ID no. 13602463
  misc_feature (1)..(1214): Ortholog of  Ceres SEQ ID NO 13598417 as cited in SEQ ID NO 62576

SEQ ID NO: 110478 - protein, 326 aa, Arabidopsis thaliana; identical to SEQ ID NO: 99239
  peptide (1)..(326): Ceres Seq. ID no. 13602464

SEQ ID NO: 110479 - protein, 317 aa, Arabidopsis thaliana; identical to SEQ ID NO: 42732
  peptide (1)..(317): Ceres Seq. ID no. 13602465

SEQ ID NO: 110480 - protein, 267 aa, Arabidopsis thaliana; identical to SEQ ID NO: 42733
  peptide (1)..(267): Ceres Seq. ID no. 13602466

SEQ ID NO: 110481 - DNA, 1206 bp, Arabidopsis thaliana; identical to SEQ ID NO: 99242
  misc_feature (1)..(1206): Ceres Seq. ID no. 13602471
  misc_feature (1)..(1206): Ortholog of  Ceres SEQ ID NO 15172958 as cited in SEQ ID NO 51206
  misc_feature (1)..(1206): Ortholog of  Ceres SEQ ID NO 15171139 as cited in SEQ ID NO 60093

SEQ ID NO: 110482 - protein, 312 aa, Arabidopsis thaliana; identical to SEQ ID NO: 41266
  peptide (1)..(312): Ceres Seq. ID no. 13602472

SEQ ID NO: 110483 - DNA, 959 bp, Arabidopsis thaliana; identical to SEQ ID NO: 99244
  misc_feature (1)..(959): Ceres Seq. ID no. 13602473
  misc_feature (1)..(959): Ortholog of  Ceres SEQ ID NO 13598313 as cited in SEQ ID NO 68293

SEQ ID NO: 110484 - protein, 255 aa, Arabidopsis thaliana; identical to SEQ ID NO: 99245
  peptide (1)..(255): Ceres Seq. ID no. 13602474

SEQ ID NO: 110485 - protein, 233 aa, Arabidopsis thaliana; identical to SEQ ID NO: 99246
  peptide (1)..(233): Ceres Seq. ID no. 13602475

SEQ ID NO: 110486 - protein, 175 aa, Arabidopsis thaliana; identical to SEQ ID NO: 99247
  peptide (1)..(175): Ceres Seq. ID no. 13602476

SEQ ID NO: 110487 - DNA, 2559 bp, Arabidopsis thaliana; identical to SEQ ID NO: 99248
  misc_feature (1)..(2559): Ceres Seq. ID no. 13602481
  misc_feature (1)..(2559): Ortholog of  Ceres SEQ ID NO 13600595 as cited in SEQ ID NO 629
  misc_feature (1)..(2559): Ortholog of  Ceres SEQ ID NO 13593379 as cited in SEQ ID NO 20573

SEQ ID NO: 110488 - protein, 724 aa, Arabidopsis thaliana; identical to SEQ ID NO: 99249
  peptide (1)..(724): Ceres Seq. ID no. 13602482

SEQ ID NO: 110489 - protein, 666 aa, Arabidopsis thaliana; identical to SEQ ID NO: 99250
  peptide (1)..(666): Ceres Seq. ID no. 13602483

SEQ ID NO: 110490 - protein, 585 aa, Arabidopsis thaliana; identical to SEQ ID NO: 99251
  peptide (1)..(585): Ceres Seq. ID no. 13602484

SEQ ID NO: 110491 - DNA, 1006 bp, Arabidopsis thaliana; identical to SEQ ID NO: 99252
  misc_feature (1)..(1006): Ceres Seq. ID no. 13602513
  misc_feature (1)..(1006): Ortholog of  Ceres SEQ ID NO 13595263 as cited in SEQ ID NO 56712
  misc_feature (1)..(1006): Ortholog of  Ceres SEQ ID NO 13655622 as cited in SEQ ID NO 64213

SEQ ID NO: 110492 - protein, 219 aa, Arabidopsis thaliana; identical to SEQ ID NO: 21848
  peptide (1)..(219): Ceres Seq. ID no. 13602514

SEQ ID NO: 110493 - DNA, 1172 bp, Arabidopsis thaliana; identical to SEQ ID NO: 99254
  misc_feature (1)..(1172): Ceres Seq. ID no. 13602519
  misc_feature (1)..(1172): Ortholog of  Ceres SEQ ID NO 13583327 as cited in SEQ ID NO 62047

SEQ ID NO: 110494 - protein, 318 aa, Arabidopsis thaliana; identical to SEQ ID NO: 99255
  peptide (1)..(318): Ceres Seq. ID no. 13602520

SEQ ID NO: 110495 - protein, 269 aa, Arabidopsis thaliana; identical to SEQ ID NO: 41093
  peptide (1)..(269): Ceres Seq. ID no. 13602521

SEQ ID NO: 110496 - protein, 229 aa, Arabidopsis thaliana; identical to SEQ ID NO: 41094
  peptide (1)..(229): Ceres Seq. ID no. 13602522

SEQ ID NO: 110497 - DNA, 1382 bp, Arabidopsis thaliana; identical to SEQ ID NO: 99258
  misc_feature (1)..(1382): Ceres Seq. ID no. 13602523
  misc_feature (1)..(1382): Ortholog of  Ceres SEQ ID NO 12364737 as cited in SEQ ID NO 51089
  misc_feature (1)..(1382): Ortholog of  Ceres SEQ ID NO 14306553 as cited in SEQ ID NO 53121
  misc_feature (1)..(1382): Ortholog of  Ceres SEQ ID NO 13595567 as cited in SEQ ID NO 56760
  misc_feature (1)..(1382): Ortholog of  Ceres SEQ ID NO 13655302 as cited in SEQ ID NO 63307
  misc_feature (1)..(1382): Ortholog of  Ceres SEQ ID NO 13597380 as cited in SEQ ID NO 64054
  misc_feature (1)..(1382): Ortholog of  Ceres SEQ ID NO 12625474 as cited in SEQ ID NO 64169
  misc_feature (1)..(1382): Ortholog of  Ceres SEQ ID NO 13597502 as cited in SEQ ID NO 64681

SEQ ID NO: 110498 - protein, 356 aa, Arabidopsis thaliana; identical to SEQ ID NO: 99259
  peptide (1)..(356): Ceres Seq. ID no. 13602524

SEQ ID NO: 110499 - protein, 355 aa, Arabidopsis thaliana; identical to SEQ ID NO: 99260
  peptide (1)..(355): Ceres Seq. ID no. 13602525

SEQ ID NO: 110500 - protein, 198 aa, Arabidopsis thaliana; identical to SEQ ID NO: 99261
  peptide (1)..(198): Ceres Seq. ID no. 13602526

SEQ ID NO: 110501 - DNA, 760 bp, Arabidopsis thaliana; identical to SEQ ID NO: 99262
  misc_feature (1)..(760): Ceres Seq. ID no. 13602531
  misc_feature (1)..(760): Ortholog of  Ceres SEQ ID NO 14309614 as cited in SEQ ID NO 52633

SEQ ID NO: 110502 - protein, 178 aa, Arabidopsis thaliana; identical to SEQ ID NO: 99263
  peptide (1)..(178): Ceres Seq. ID no. 13602532

SEQ ID NO: 110503 - protein, 149 aa, Arabidopsis thaliana; identical to SEQ ID NO: 27678
  peptide (1)..(149): Ceres Seq. ID no. 13602533

SEQ ID NO: 110504 - protein, 113 aa, Arabidopsis thaliana; identical to SEQ ID NO: 27679
  peptide (1)..(113): Ceres Seq. ID no. 13602534

SEQ ID NO: 110505 - DNA, 1870 bp, Arabidopsis thaliana; identical to SEQ ID NO: 99266
  misc_feature (1)..(1870): Ceres Seq. ID no. 13602535
  misc_feature (1)..(1870): Ortholog of  Ceres SEQ ID NO 13654989 as cited in SEQ ID NO 63117
  misc_feature (1)..(1870): Ortholog of  Ceres SEQ ID NO 13657138 as cited in SEQ ID NO 65923
  misc_feature (1)..(1870): Ortholog of  Ceres SEQ ID NO 13584744 as cited in SEQ ID NO 69137

SEQ ID NO: 110506 - protein, 552 aa, Arabidopsis thaliana; identical to SEQ ID NO: 39282
  peptide (1)..(552): Ceres Seq. ID no. 13602536

SEQ ID NO: 110507 - protein, 499 aa, Arabidopsis thaliana; identical to SEQ ID NO: 39283
  peptide (1)..(499): Ceres Seq. ID no. 13602537

SEQ ID NO: 110508 - protein, 445 aa, Arabidopsis thaliana; identical to SEQ ID NO: 39284
  peptide (1)..(445): Ceres Seq. ID no. 13602538

SEQ ID NO: 110509 - DNA, 1252 bp, Arabidopsis thaliana; identical to SEQ ID NO: 99270
  misc_feature (1)..(1252): Ceres Seq. ID no. 13602539
  misc_feature (1)..(1252): Ortholog of  Ceres SEQ ID NO 13596891 as cited in SEQ ID NO 62868
  misc_feature (1)..(1252): Ortholog of  Ceres SEQ ID NO 12617235 as cited in SEQ ID NO 63990
  misc_feature (1)..(1252): Ortholog of  Ceres SEQ ID NO 13655371 as cited in SEQ ID NO 68945

SEQ ID NO: 110510 - protein, 368 aa, Arabidopsis thaliana; identical to SEQ ID NO: 99271
  peptide (1)..(368): Ceres Seq. ID no. 13602540

SEQ ID NO: 110511 - protein, 353 aa, Arabidopsis thaliana; identical to SEQ ID NO: 99272
  peptide (1)..(353): Ceres Seq. ID no. 13602541

SEQ ID NO: 110512 - protein, 308 aa, Arabidopsis thaliana; identical to SEQ ID NO: 99273
  peptide (1)..(308): Ceres Seq. ID no. 13602542

SEQ ID NO: 110513 - DNA, 1302 bp, Arabidopsis thaliana; identical to SEQ ID NO: 99274
  misc_feature (1)..(1302): Ceres Seq. ID no. 13602547
  misc_feature (1)..(1302): Ortholog of  Ceres SEQ ID NO 13596090 as cited in SEQ ID NO 68377
  misc_feature (1)..(1302): Ortholog of  Ceres SEQ ID NO 14303557 as cited in SEQ ID NO 68595

SEQ ID NO: 110514 - protein, 336 aa, Arabidopsis thaliana; identical to SEQ ID NO: 99275
  peptide (1)..(336): Ceres Seq. ID no. 13602548

SEQ ID NO: 110515 - protein, 255 aa, Arabidopsis thaliana; identical to SEQ ID NO: 99276
  peptide (1)..(255): Ceres Seq. ID no. 13602549

SEQ ID NO: 110516 - protein, 239 aa, Arabidopsis thaliana; identical to SEQ ID NO: 99277
  peptide (1)..(239): Ceres Seq. ID no. 13602550

SEQ ID NO: 110517 - DNA, 1552 bp, Arabidopsis thaliana; identical to SEQ ID NO: 99278
  misc_feature (1)..(1552): Ceres Seq. ID no. 13602571
  misc_feature (1)..(1552): Ortholog of  Ceres SEQ ID NO 13599900 as cited in SEQ ID NO 531
  misc_feature (1)..(1552): Ortholog of  Ceres SEQ ID NO 13596509 as cited in SEQ ID NO 62004
  misc_feature (1)..(1552): Ortholog of  Ceres SEQ ID NO 13659971 as cited in SEQ ID NO 67565
  misc_feature (1)..(1552): Ortholog of  Ceres SEQ ID NO 13500385 as cited in SEQ ID NO 67583

SEQ ID NO: 110518 - protein, 435 aa, Arabidopsis thaliana; identical to SEQ ID NO: 99279
  peptide (1)..(435): Ceres Seq. ID no. 13602572

SEQ ID NO: 110519 - protein, 416 aa, Arabidopsis thaliana; identical to SEQ ID NO: 99280
  peptide (1)..(416): Ceres Seq. ID no. 13602573

SEQ ID NO: 110520 - protein, 353 aa, Arabidopsis thaliana; identical to SEQ ID NO: 99281
  peptide (1)..(353): Ceres Seq. ID no. 13602574

SEQ ID NO: 110521 - DNA, 1382 bp, Arabidopsis thaliana; identical to SEQ ID NO: 99282
  misc_feature (1)..(1382): Ceres Seq. ID no. 13602579
  misc_feature (1)..(1382): Ortholog of  Ceres SEQ ID NO 14303313 as cited in SEQ ID NO 64389

SEQ ID NO: 110522 - protein, 338 aa, Arabidopsis thaliana; identical to SEQ ID NO: 23209
  peptide (1)..(338): Ceres Seq. ID no. 13602580

SEQ ID NO: 110523 - protein, 192 aa, Arabidopsis thaliana; identical to SEQ ID NO: 23210
  peptide (1)..(192): Ceres Seq. ID no. 13602581

SEQ ID NO: 110524 - protein, 177 aa, Arabidopsis thaliana; identical to SEQ ID NO: 23211
  peptide (1)..(177): Ceres Seq. ID no. 13602582

SEQ ID NO: 110525 - DNA, 1495 bp, Arabidopsis thaliana; identical to SEQ ID NO: 99286
  misc_feature (1)..(1495): Ceres Seq. ID no. 13602587
  misc_feature (1)..(1495): Ortholog of  Ceres SEQ ID NO 13595870 as cited in SEQ ID NO 62101
  misc_feature (1)..(1495): Ortholog of  Ceres SEQ ID NO 13590241 as cited in SEQ ID NO 63878
  misc_feature (1)..(1495): Ortholog of  Ceres SEQ ID NO 13657939 as cited in SEQ ID NO 66349
  misc_feature (1)..(1495): Ortholog of  Ceres SEQ ID NO 13660597 as cited in SEQ ID NO 67655

SEQ ID NO: 110526 - protein, 449 aa, Arabidopsis thaliana; identical to SEQ ID NO: 24378
  peptide (1)..(449): Ceres Seq. ID no. 13602588

SEQ ID NO: 110527 - protein, 403 aa, Arabidopsis thaliana; identical to SEQ ID NO: 24379
  peptide (1)..(403): Ceres Seq. ID no. 13602589

SEQ ID NO: 110528 - protein, 267 aa, Arabidopsis thaliana; identical to SEQ ID NO: 24380
  peptide (1)..(267): Ceres Seq. ID no. 13602590

SEQ ID NO: 110529 - DNA, 1371 bp, Arabidopsis thaliana; identical to SEQ ID NO: 99290
  misc_feature (1)..(1371): Ceres Seq. ID no. 13602599
  misc_feature (1)..(1371): Ortholog of  Ceres SEQ ID NO 13598513 as cited in SEQ ID NO 64102

SEQ ID NO: 110530 - protein, 378 aa, Arabidopsis thaliana; identical to SEQ ID NO: 99291
  peptide (1)..(378): Ceres Seq. ID no. 13602600

SEQ ID NO: 110531 - protein, 339 aa, Arabidopsis thaliana; identical to SEQ ID NO: 99292
  peptide (1)..(339): Ceres Seq. ID no. 13602601

SEQ ID NO: 110532 - protein, 290 aa, Arabidopsis thaliana; identical to SEQ ID NO: 99293
  peptide (1)..(290): Ceres Seq. ID no. 13602602

SEQ ID NO: 110533 - DNA, 1540 bp, Arabidopsis thaliana; identical to SEQ ID NO: 99294
  misc_feature (1)..(1540): Ceres Seq. ID no. 13602619
  misc_feature (1)..(1540): Ortholog of  Ceres SEQ ID NO 13597446 as cited in SEQ ID NO 64098
  misc_feature (1)..(1540): Ortholog of  Ceres SEQ ID NO 15226246 as cited in SEQ ID NO 68314

SEQ ID NO: 110534 - protein, 454 aa, Arabidopsis thaliana; identical to SEQ ID NO: 99295
  peptide (1)..(454): Ceres Seq. ID no. 13602620

SEQ ID NO: 110535 - protein, 449 aa, Arabidopsis thaliana; identical to SEQ ID NO: 99296
  peptide (1)..(449): Ceres Seq. ID no. 13602621

SEQ ID NO: 110536 - protein, 363 aa, Arabidopsis thaliana; identical to SEQ ID NO: 99297
  peptide (1)..(363): Ceres Seq. ID no. 13602622

SEQ ID NO: 110537 - DNA, 1793 bp, Arabidopsis thaliana; identical to SEQ ID NO: 99298
  misc_feature (1)..(1793): Ceres Seq. ID no. 13602630
  misc_feature (1)..(1793): Ortholog of  Ceres SEQ ID NO 13596398 as cited in SEQ ID NO 68611

SEQ ID NO: 110538 - protein, 483 aa, Arabidopsis thaliana; identical to SEQ ID NO: 38636
  peptide (1)..(483): Ceres Seq. ID no. 13602631

SEQ ID NO: 110539 - protein, 432 aa, Arabidopsis thaliana; identical to SEQ ID NO: 38637
  peptide (1)..(432): Ceres Seq. ID no. 13602632

SEQ ID NO: 110540 - protein, 397 aa, Arabidopsis thaliana; identical to SEQ ID NO: 38638
  peptide (1)..(397): Ceres Seq. ID no. 13602633

SEQ ID NO: 110541 - DNA, 1250 bp, Arabidopsis thaliana; identical to SEQ ID NO: 99302
  misc_feature (1)..(1250): Ceres Seq. ID no. 13602634
  misc_feature (1)..(1250): Ortholog of  Ceres SEQ ID NO 14302852 as cited in SEQ ID NO 64814
  misc_feature (1)..(1250): Ortholog of  Ceres SEQ ID NO 13598593 as cited in SEQ ID NO 64978
  misc_feature (1)..(1250): Ortholog of  Ceres SEQ ID NO 14303067 as cited in SEQ ID NO 67078
  misc_feature (1)..(1250): Ortholog of  Ceres SEQ ID NO 13595992 as cited in SEQ ID NO 68401

SEQ ID NO: 110542 - protein, 353 aa, Arabidopsis thaliana; identical to SEQ ID NO: 99303
  peptide (1)..(353): Ceres Seq. ID no. 13602635

SEQ ID NO: 110543 - protein, 337 aa, Arabidopsis thaliana; identical to SEQ ID NO: 99304
  peptide (1)..(337): Ceres Seq. ID no. 13602636

SEQ ID NO: 110544 - protein, 285 aa, Arabidopsis thaliana; identical to SEQ ID NO: 99305
  peptide (1)..(285): Ceres Seq. ID no. 13602637

SEQ ID NO: 110545 - DNA, 1171 bp, Arabidopsis thaliana; identical to SEQ ID NO: 99306
  misc_feature (1)..(1171): Ceres Seq. ID no. 13602642
  misc_feature (1)..(1171): Ortholog of  Ceres SEQ ID NO 13599316 as cited in SEQ ID NO 0

SEQ ID NO: 110546 - protein, 326 aa, Arabidopsis thaliana; identical to SEQ ID NO: 21766
  peptide (1)..(326): Ceres Seq. ID no. 13602643

SEQ ID NO: 110547 - protein, 297 aa, Arabidopsis thaliana; identical to SEQ ID NO: 21767
  peptide (1)..(297): Ceres Seq. ID no. 13602644

SEQ ID NO: 110548 - protein, 291 aa, Arabidopsis thaliana; identical to SEQ ID NO: 21768
  peptide (1)..(291): Ceres Seq. ID no. 13602645

SEQ ID NO: 110549 - DNA, 811 bp, Arabidopsis thaliana; identical to SEQ ID NO: 99310
  misc_feature (1)..(811): Ceres Seq. ID no. 13602646
  misc_feature (1)..(811): Ortholog of  Ceres SEQ ID NO 12582856 as cited in SEQ ID NO 51905
  misc_feature (1)..(811): Ortholog of  Ceres SEQ ID NO 14316155 as cited in SEQ ID NO 52377

SEQ ID NO: 110550 - protein, 156 aa, Arabidopsis thaliana; identical to SEQ ID NO: 29421
  peptide (1)..(156): Ceres Seq. ID no. 13602647

SEQ ID NO: 110551 - protein, 154 aa, Arabidopsis thaliana; identical to SEQ ID NO: 29422
  peptide (1)..(154): Ceres Seq. ID no. 13602648

SEQ ID NO: 110552 - protein, 152 aa, Arabidopsis thaliana; identical to SEQ ID NO: 29423
  peptide (1)..(152): Ceres Seq. ID no. 13602649

SEQ ID NO: 110553 - DNA, 766 bp, Arabidopsis thaliana; identical to SEQ ID NO: 99314
  misc_feature (1)..(766): Ceres Seq. ID no. 13602650
  misc_feature (1)..(766): Ortholog of  Ceres SEQ ID NO 15172961 as cited in SEQ ID NO 51757
  misc_feature (1)..(766): Ortholog of  Ceres SEQ ID NO 15173213 as cited in SEQ ID NO 57923
  misc_feature (1)..(766): Ortholog of  Ceres SEQ ID NO 13660855 as cited in SEQ ID NO 67670

SEQ ID NO: 110554 - protein, 198 aa, Arabidopsis thaliana; identical to SEQ ID NO: 20975
  peptide (1)..(198): Ceres Seq. ID no. 13602651

SEQ ID NO: 110555 - protein, 195 aa, Arabidopsis thaliana; identical to SEQ ID NO: 20976
  peptide (1)..(195): Ceres Seq. ID no. 13602652

SEQ ID NO: 110556 - protein, 128 aa, Arabidopsis thaliana; identical to SEQ ID NO: 20977
  peptide (1)..(128): Ceres Seq. ID no. 13602653

SEQ ID NO: 110557 - DNA, 790 bp, Arabidopsis thaliana; identical to SEQ ID NO: 99318
  misc_feature (1)..(790): Ceres Seq. ID no. 13602654
  misc_feature (1)..(790): Ortholog of  Ceres SEQ ID NO 12588828 as cited in SEQ ID NO 1280

SEQ ID NO: 110558 - protein, 207 aa, Arabidopsis thaliana; identical to SEQ ID NO: 99319
  peptide (1)..(207): Ceres Seq. ID no. 13602655

SEQ ID NO: 110559 - protein, 192 aa, Arabidopsis thaliana; identical to SEQ ID NO: 99320
  peptide (1)..(192): Ceres Seq. ID no. 13602656

SEQ ID NO: 110560 - DNA, 1401 bp, Arabidopsis thaliana; identical to SEQ ID NO: 99321
  misc_feature (1)..(1401): Ceres Seq. ID no. 13602669
  misc_feature (1)..(1401): Ortholog of  Ceres SEQ ID NO 14315626 as cited in SEQ ID NO 52943
  misc_feature (1)..(1401): Ortholog of  Ceres SEQ ID NO 14313536 as cited in SEQ ID NO 67925

SEQ ID NO: 110561 - protein, 387 aa, Arabidopsis thaliana; identical to SEQ ID NO: 39504
  peptide (1)..(387): Ceres Seq. ID no. 13602670

SEQ ID NO: 110562 - protein, 365 aa, Arabidopsis thaliana; identical to SEQ ID NO: 39505
  peptide (1)..(365): Ceres Seq. ID no. 13602671

SEQ ID NO: 110563 - protein, 364 aa, Arabidopsis thaliana; identical to SEQ ID NO: 39506
  peptide (1)..(364): Ceres Seq. ID no. 13602672

SEQ ID NO: 110564 - DNA, 1372 bp, Arabidopsis thaliana; identical to SEQ ID NO: 99325
  misc_feature (1)..(1372): Ceres Seq. ID no. 13602673
  misc_feature (1)..(1372): Ortholog of  Ceres SEQ ID NO 13655881 as cited in SEQ ID NO 64426

SEQ ID NO: 110565 - protein, 422 aa, Arabidopsis thaliana; identical to SEQ ID NO: 99326
  peptide (1)..(422): Ceres Seq. ID no. 13602674

SEQ ID NO: 110566 - protein, 418 aa, Arabidopsis thaliana [sequence omitted]

SEQ ID NO: 110567 - protein, 380 aa, Arabidopsis thaliana; identical to SEQ ID NO: 99328
  peptide (1)..(380): Ceres Seq. ID no. 13602676

SEQ ID NO: 110568 - DNA, 1073 bp, Arabidopsis thaliana; identical to SEQ ID NO: 99329
  misc_feature (1)..(1073): Ceres Seq. ID no. 13602677
  misc_feature (1)..(1073): Ortholog of  Ceres SEQ ID NO 13596762 as cited in SEQ ID NO 63019

SEQ ID NO: 110569 - protein, 282 aa, Arabidopsis thaliana; identical to SEQ ID NO: 99330
  peptide (1)..(282): Ceres Seq. ID no. 13602678

SEQ ID NO: 110570 - protein, 273 aa, Arabidopsis thaliana; identical to SEQ ID NO: 99331
  peptide (1)..(273): Ceres Seq. ID no. 13602679

SEQ ID NO: 110571 - protein, 260 aa, Arabidopsis thaliana; identical to SEQ ID NO: 99332
  peptide (1)..(260): Ceres Seq. ID no. 13602680

SEQ ID NO: 110572 - DNA, 1760 bp, Arabidopsis thaliana; identical to SEQ ID NO: 99333
  misc_feature (1)..(1760): Ceres Seq. ID no. 13602681
  misc_feature (1)..(1760): Ortholog of  Ceres SEQ ID NO 14307571 as cited in SEQ ID NO 58392

SEQ ID NO: 110573 - protein, 547 aa, Arabidopsis thaliana; identical to SEQ ID NO: 99334
  peptide (1)..(547): Ceres Seq. ID no. 13602682

SEQ ID NO: 110574 - protein, 532 aa, Arabidopsis thaliana; identical to SEQ ID NO: 99335
  peptide (1)..(532): Ceres Seq. ID no. 13602683

SEQ ID NO: 110575 - protein, 400 aa, Arabidopsis thaliana; identical to SEQ ID NO: 99336
  peptide (1)..(400): Ceres Seq. ID no. 13602684

SEQ ID NO: 110576 - DNA, 2154 bp, Arabidopsis thaliana; identical to SEQ ID NO: 99337
  misc_feature (1)..(2154): Ceres Seq. ID no. 13602685
  misc_feature (1)..(2154): Ortholog of  Ceres SEQ ID NO 13599779 as cited in SEQ ID NO 0

SEQ ID NO: 110577 - protein, 600 aa, Arabidopsis thaliana; identical to SEQ ID NO: 99338
  peptide (1)..(600): Ceres Seq. ID no. 13602686

SEQ ID NO: 110578 - protein, 478 aa, Arabidopsis thaliana; identical to SEQ ID NO: 99339
  peptide (1)..(478): Ceres Seq. ID no. 13602687

SEQ ID NO: 110579 - protein, 411 aa, Arabidopsis thaliana; identical to SEQ ID NO: 99340
  peptide (1)..(411): Ceres Seq. ID no. 13602688

SEQ ID NO: 110580 - DNA, 624 bp, Arabidopsis thaliana; identical to SEQ ID NO: 99341
  misc_feature (1)..(624): Ceres Seq. ID no. 13602689
  misc_feature (1)..(624): Ortholog of  Ceres SEQ ID NO 13594501 as cited in SEQ ID NO 51327

SEQ ID NO: 110581 - protein, 173 aa, Arabidopsis thaliana; identical to SEQ ID NO: 99342
  peptide (1)..(173): Ceres Seq. ID no. 13602690

SEQ ID NO: 110582 - protein, 148 aa, Arabidopsis thaliana; identical to SEQ ID NO: 99343
  peptide (1)..(148): Ceres Seq. ID no. 13602691

SEQ ID NO: 110583 - DNA, 1042 bp, Arabidopsis thaliana; identical to SEQ ID NO: 99344
  misc_feature (1)..(1042): Ceres Seq. ID no. 13602696
  misc_feature (1)..(1042): Ortholog of  Ceres SEQ ID NO 14303831 as cited in SEQ ID NO 52976
  misc_feature (1)..(1042): Ortholog of  Ceres SEQ ID NO 12619453 as cited in SEQ ID NO 65952

SEQ ID NO: 110584 - protein, 310 aa, Arabidopsis thaliana; identical to SEQ ID NO: 99345
  peptide (1)..(310): Ceres Seq. ID no. 13602697

SEQ ID NO: 110585 - protein, 291 aa, Arabidopsis thaliana; identical to SEQ ID NO: 99346
  peptide (1)..(291): Ceres Seq. ID no. 13602698

SEQ ID NO: 110586 - protein, 290 aa, Arabidopsis thaliana; identical to SEQ ID NO: 99347
  peptide (1)..(290): Ceres Seq. ID no. 13602699

SEQ ID NO: 110587 - DNA, 623 bp, Arabidopsis thaliana; identical to SEQ ID NO: 99348
  misc_feature (1)..(623): Ceres Seq. ID no. 13602700
  misc_feature (1)..(623): Ortholog of  Ceres SEQ ID NO 14305493 as cited in SEQ ID NO 0

SEQ ID NO: 110588 - protein, 159 aa, Arabidopsis thaliana; identical to SEQ ID NO: 99349
  peptide (1)..(159): Ceres Seq. ID no. 13602701

SEQ ID NO: 110589 - protein, 151 aa, Arabidopsis thaliana; identical to SEQ ID NO: 99350
  peptide (1)..(151): Ceres Seq. ID no. 13602702

SEQ ID NO: 110590 - DNA, 1062 bp, Arabidopsis thaliana; identical to SEQ ID NO: 99351
  misc_feature (1)..(1062): Ceres Seq. ID no. 13602711
  misc_feature (1)..(1062): Ortholog of  Ceres SEQ ID NO 13598479 as cited in SEQ ID NO 60680

SEQ ID NO: 110591 - protein, 215 aa, Arabidopsis thaliana; identical to SEQ ID NO: 35467
  peptide (1)..(215): Ceres Seq. ID no. 13602712

SEQ ID NO: 110592 - protein, 206 aa, Arabidopsis thaliana; identical to SEQ ID NO: 35468
  peptide (1)..(206): Ceres Seq. ID no. 13602713

SEQ ID NO: 110593 - protein, 153 aa, Arabidopsis thaliana; identical to SEQ ID NO: 35469
  peptide (1)..(153): Ceres Seq. ID no. 13602714

SEQ ID NO: 110594 - DNA, 1919 bp, Arabidopsis thaliana; identical to SEQ ID NO: 99355
  misc_feature (1)..(1919): Ceres Seq. ID no. 13602718
  misc_feature (1)..(1919): Ortholog of  Ceres SEQ ID NO 14307896 as cited in SEQ ID NO 66915
  misc_feature (1)..(1919): Ortholog of  Ceres SEQ ID NO 13657008 as cited in SEQ ID NO 69164

SEQ ID NO: 110595 - protein, 559 aa, Arabidopsis thaliana; identical to SEQ ID NO: 35694
  peptide (1)..(559): Ceres Seq. ID no. 13602719

SEQ ID NO: 110596 - protein, 492 aa, Arabidopsis thaliana; identical to SEQ ID NO: 35695
  peptide (1)..(492): Ceres Seq. ID no. 13602720

SEQ ID NO: 110597 - protein, 400 aa, Arabidopsis thaliana; identical to SEQ ID NO: 35696
  peptide (1)..(400): Ceres Seq. ID no. 13602721

SEQ ID NO: 110598 - DNA, 1829 bp, Arabidopsis thaliana; identical to SEQ ID NO: 99359
  misc_feature (1)..(1829): Ceres Seq. ID no. 13602722
  misc_feature (1)..(1829): Ortholog of  Ceres SEQ ID NO 14314620 as cited in SEQ ID NO 56872
  misc_feature (1)..(1829): Ortholog of  Ceres SEQ ID NO 15178460 as cited in SEQ ID NO 66107

SEQ ID NO: 110599 - protein, 488 aa, Arabidopsis thaliana; identical to SEQ ID NO: 24918
  peptide (1)..(488): Ceres Seq. ID no. 13602723

SEQ ID NO: 110600 - protein, 486 aa, Arabidopsis thaliana; identical to SEQ ID NO: 24919
  peptide (1)..(486): Ceres Seq. ID no. 13602724

SEQ ID NO: 110601 - protein, 471 aa, Arabidopsis thaliana; identical to SEQ ID NO: 24920
  peptide (1)..(471): Ceres Seq. ID no. 13602725

SEQ ID NO: 110602 - DNA, 684 bp, Arabidopsis thaliana; identical to SEQ ID NO: 99363
  misc_feature (1)..(684): Ceres Seq. ID no. 13602729
  misc_feature (1)..(684): Ortholog of  Ceres SEQ ID NO 12635643 as cited in SEQ ID NO 340
  misc_feature (1)..(684): Ortholog of  Ceres SEQ ID NO 13661877 as cited in SEQ ID NO 61689

SEQ ID NO: 110603 - protein, 153 aa, Arabidopsis thaliana; identical to SEQ ID NO: 25440
  peptide (1)..(153): Ceres Seq. ID no. 13602730

SEQ ID NO: 110604 - protein, 152 aa, Arabidopsis thaliana; identical to SEQ ID NO: 25441
  peptide (1)..(152): Ceres Seq. ID no. 13602731

SEQ ID NO: 110605 - protein, 146 aa, Arabidopsis thaliana; identical to SEQ ID NO: 25442
  peptide (1)..(146): Ceres Seq. ID no. 13602732

SEQ ID NO: 110606 - DNA, 611 bp, Arabidopsis thaliana; identical to SEQ ID NO: 99367
  misc_feature (1)..(611): Ceres Seq. ID no. 13602733
  misc_feature (1)..(611): Ortholog of  Ceres SEQ ID NO 14305840 as cited in SEQ ID NO 52339

SEQ ID NO: 110607 - protein, 141 aa, Arabidopsis thaliana; identical to SEQ ID NO: 30288
  peptide (1)..(141): Ceres Seq. ID no. 13602734

SEQ ID NO: 110608 - protein, 119 aa, Arabidopsis thaliana; identical to SEQ ID NO: 30289
  peptide (1)..(119): Ceres Seq. ID no. 13602735

SEQ ID NO: 110609 - protein, 97 aa, Arabidopsis thaliana; identical to SEQ ID NO: 30290
  peptide (1)..(97): Ceres Seq. ID no. 13602736

SEQ ID NO: 110610 - DNA, 1080 bp, Arabidopsis thaliana; identical to SEQ ID NO: 99371
  misc_feature (1)..(1080): Ceres Seq. ID no. 13602741
  misc_feature (1)..(1080): Ortholog of  Ceres SEQ ID NO 13594482 as cited in SEQ ID NO 51285
  misc_feature (1)..(1080): Ortholog of  Ceres SEQ ID NO 12617583 as cited in SEQ ID NO 64897

SEQ ID NO: 110611 - protein, 289 aa, Arabidopsis thaliana; identical to SEQ ID NO: 99372
  peptide (1)..(289): Ceres Seq. ID no. 13602742

SEQ ID NO: 110612 - protein, 279 aa, Arabidopsis thaliana; identical to SEQ ID NO: 99373
  peptide (1)..(279): Ceres Seq. ID no. 13602743

SEQ ID NO: 110613 - protein, 275 aa, Arabidopsis thaliana; identical to SEQ ID NO: 99374
  peptide (1)..(275): Ceres Seq. ID no. 13602744

SEQ ID NO: 110614 - DNA, 893 bp, Arabidopsis thaliana; identical to SEQ ID NO: 99375
  misc_feature (1)..(893): Ceres Seq. ID no. 13602745
  misc_feature (1)..(893): Ortholog of  Ceres SEQ ID NO 13505291 as cited in SEQ ID NO 56614
  misc_feature (1)..(893): Ortholog of  Ceres SEQ ID NO 13596535 as cited in SEQ ID NO 62321
  misc_feature (1)..(893): Ortholog of  Ceres SEQ ID NO 13597394 as cited in SEQ ID NO 63457

SEQ ID NO: 110615 - protein, 233 aa, Arabidopsis thaliana; identical to SEQ ID NO: 99376
  peptide (1)..(233): Ceres Seq. ID no. 13602746

SEQ ID NO: 110616 - protein, 210 aa, Arabidopsis thaliana; identical to SEQ ID NO: 99377
  peptide (1)..(210): Ceres Seq. ID no. 13602747

SEQ ID NO: 110617 - protein, 191 aa, Arabidopsis thaliana; identical to SEQ ID NO: 99378
  peptide (1)..(191): Ceres Seq. ID no. 13602748

SEQ ID NO: 110618 - DNA, 949 bp, Arabidopsis thaliana; identical to SEQ ID NO: 99379
  misc_feature (1)..(949): Ceres Seq. ID no. 13602761
  misc_feature (1)..(949): Ortholog of  Ceres SEQ ID NO 15179139 as cited in SEQ ID NO 1093
  misc_feature (1)..(949): Ortholog of  Ceres SEQ ID NO 15226793 as cited in SEQ ID NO 58689

SEQ ID NO: 110619 - protein, 258 aa, Arabidopsis thaliana; identical to SEQ ID NO: 26683
  peptide (1)..(258): Ceres Seq. ID no. 13602762

SEQ ID NO: 110620 - protein, 251 aa, Arabidopsis thaliana; identical to SEQ ID NO: 26684
  peptide (1)..(251): Ceres Seq. ID no. 13602763

SEQ ID NO: 110621 - protein, 244 aa, Arabidopsis thaliana; identical to SEQ ID NO: 26685
  peptide (1)..(244): Ceres Seq. ID no. 13602764

SEQ ID NO: 110622 - DNA, 1302 bp, Arabidopsis thaliana; identical to SEQ ID NO: 99383
  misc_feature (1)..(1302): Ceres Seq. ID no. 13602772
  misc_feature (1)..(1302): Ortholog of  Ceres SEQ ID NO 15170595 as cited in SEQ ID NO 57510
  misc_feature (1)..(1302): Ortholog of  Ceres SEQ ID NO 13655218 as cited in SEQ ID NO 68872

SEQ ID NO: 110623 - protein, 326 aa, Arabidopsis thaliana; identical to SEQ ID NO: 27663
  peptide (1)..(326): Ceres Seq. ID no. 13602773

SEQ ID NO: 110624 - protein, 267 aa, Arabidopsis thaliana; identical to SEQ ID NO: 27664
  peptide (1)..(267): Ceres Seq. ID no. 13602774

SEQ ID NO: 110625 - DNA, 1615 bp, Arabidopsis thaliana; identical to SEQ ID NO: 99386
  misc_feature (1)..(1615): Ceres Seq. ID no. 13602786
  misc_feature (1)..(1615): Ortholog of  Ceres SEQ ID NO 14311755 as cited in SEQ ID NO 57271
  misc_feature (1)..(1615): Ortholog of  Ceres SEQ ID NO 15171156 as cited in SEQ ID NO 58259
  misc_feature (1)..(1615): Ortholog of  Ceres SEQ ID NO 14302212 as cited in SEQ ID NO 66507
  misc_feature (1)..(1615): Ortholog of  Ceres SEQ ID NO 13653980 as cited in SEQ ID NO 69253

SEQ ID NO: 110626 - protein, 408 aa, Arabidopsis thaliana; identical to SEQ ID NO: 34976
  peptide (1)..(408): Ceres Seq. ID no. 13602787

SEQ ID NO: 110627 - protein, 295 aa, Arabidopsis thaliana; identical to SEQ ID NO: 34977
  peptide (1)..(295): Ceres Seq. ID no. 13602788

SEQ ID NO: 110628 - protein, 272 aa, Arabidopsis thaliana; identical to SEQ ID NO: 34978
  peptide (1)..(272): Ceres Seq. ID no. 13602789

SEQ ID NO: 110629 - DNA, 1392 bp, Arabidopsis thaliana; identical to SEQ ID NO: 99390
  misc_feature (1)..(1392): Ceres Seq. ID no. 13602790
  misc_feature (1)..(1392): Ortholog of  Ceres SEQ ID NO 12364737 as cited in SEQ ID NO 51089
  misc_feature (1)..(1392): Ortholog of  Ceres SEQ ID NO 12581561 as cited in SEQ ID NO 53617
  misc_feature (1)..(1392): Ortholog of  Ceres SEQ ID NO 14316263 as cited in SEQ ID NO 55294
  misc_feature (1)..(1392): Ortholog of  Ceres SEQ ID NO 13582301 as cited in SEQ ID NO 56509
  misc_feature (1)..(1392): Ortholog of  Ceres SEQ ID NO 15176751 as cited in SEQ ID NO 59719
  misc_feature (1)..(1392): Ortholog of  Ceres SEQ ID NO 13597380 as cited in SEQ ID NO 64054
  misc_feature (1)..(1392): Ortholog of  Ceres SEQ ID NO 12625474 as cited in SEQ ID NO 64169
  misc_feature (1)..(1392): Ortholog of  Ceres SEQ ID NO 13597502 as cited in SEQ ID NO 64681

SEQ ID NO: 110630 - protein, 366 aa, Arabidopsis thaliana; identical to SEQ ID NO: 22813
  peptide (1)..(366): Ceres Seq. ID no. 13602791

SEQ ID NO: 110631 - protein, 276 aa, Arabidopsis thaliana; identical to SEQ ID NO: 22814
  peptide (1)..(276): Ceres Seq. ID no. 13602792

SEQ ID NO: 110632 - protein, 270 aa, Arabidopsis thaliana; identical to SEQ ID NO: 22815
  peptide (1)..(270): Ceres Seq. ID no. 13602793

SEQ ID NO: 110633 - DNA, 738 bp, Arabidopsis thaliana; identical to SEQ ID NO: 99394
  misc_feature (1)..(738): Ceres Seq. ID no. 13602794
  misc_feature (1)..(738): Ortholog of  Ceres SEQ ID NO 12584790 as cited in SEQ ID NO 62648

SEQ ID NO: 110634 - protein, 177 aa, Arabidopsis thaliana; identical to SEQ ID NO: 99395
  peptide (1)..(177): Ceres Seq. ID no. 13602795

SEQ ID NO: 110635 - protein, 176 aa, Arabidopsis thaliana; identical to SEQ ID NO: 99396
  peptide (1)..(176): Ceres Seq. ID no. 13602796

SEQ ID NO: 110636 - DNA, 1131 bp, Arabidopsis thaliana; identical to SEQ ID NO: 99397
  misc_feature (1)..(1131): Ceres Seq. ID no. 13602805
  misc_feature (1)..(1131): Ortholog of  Ceres SEQ ID NO 13583438 as cited in SEQ ID NO 60632

SEQ ID NO: 110637 - protein, 321 aa, Arabidopsis thaliana; identical to SEQ ID NO: 99398
  peptide (1)..(321): Ceres Seq. ID no. 13602806

SEQ ID NO: 110638 - protein, 296 aa, Arabidopsis thaliana; identical to SEQ ID NO: 24348
  peptide (1)..(296): Ceres Seq. ID no. 13602807

SEQ ID NO: 110639 - protein, 294 aa, Arabidopsis thaliana; identical to SEQ ID NO: 24349
  peptide (1)..(294): Ceres Seq. ID no. 13602808

SEQ ID NO: 110640 - DNA, 1301 bp, Arabidopsis thaliana; identical to SEQ ID NO: 99401
  misc_feature (1)..(1301): Ceres Seq. ID no. 13602809
  misc_feature (1)..(1301): Ortholog of  Ceres SEQ ID NO 15172464 as cited in SEQ ID NO 59111

SEQ ID NO: 110641 - protein, 304 aa, Arabidopsis thaliana; identical to SEQ ID NO: 99402
  peptide (1)..(304): Ceres Seq. ID no. 13602810

SEQ ID NO: 110642 - protein, 288 aa, Arabidopsis thaliana; identical to SEQ ID NO: 99403
  peptide (1)..(288): Ceres Seq. ID no. 13602811

SEQ ID NO: 110643 - protein, 245 aa, Arabidopsis thaliana; identical to SEQ ID NO: 23055
  peptide (1)..(245): Ceres Seq. ID no. 13602812

SEQ ID NO: 110644 - DNA, 1555 bp, Arabidopsis thaliana; identical to SEQ ID NO: 99405
  misc_feature (1)..(1555): Ceres Seq. ID no. 13602813
  misc_feature (1)..(1555): Ortholog of  Ceres SEQ ID NO 14313074 as cited in SEQ ID NO 59199

SEQ ID NO: 110645 - protein, 401 aa, Arabidopsis thaliana; identical to SEQ ID NO: 99406
  peptide (1)..(401): Ceres Seq. ID no. 13602814

SEQ ID NO: 110646 - protein, 267 aa, Arabidopsis thaliana; identical to SEQ ID NO: 99407
  peptide (1)..(267): Ceres Seq. ID no. 13602815

SEQ ID NO: 110647 - protein, 211 aa, Arabidopsis thaliana; identical to SEQ ID NO: 99408
  peptide (1)..(211): Ceres Seq. ID no. 13602816

SEQ ID NO: 110648 - DNA, 1475 bp, Arabidopsis thaliana; identical to SEQ ID NO: 99409
  misc_feature (1)..(1475): Ceres Seq. ID no. 13602817
  misc_feature (1)..(1475): Ortholog of  Ceres SEQ ID NO 13597581 as cited in SEQ ID NO 65344

SEQ ID NO: 110649 - protein, 395 aa, Arabidopsis thaliana; identical to SEQ ID NO: 99410
  peptide (1)..(395): Ceres Seq. ID no. 13602818

SEQ ID NO: 110650 - DNA, 1433 bp, Arabidopsis thaliana; identical to SEQ ID NO: 99411
  misc_feature (1)..(1433): Ceres Seq. ID no. 13602834
  misc_feature (1)..(1433): Ortholog of  Ceres SEQ ID NO 15177935 as cited in SEQ ID NO 60258
  misc_feature (1)..(1433): Ortholog of  Ceres SEQ ID NO 13659033 as cited in SEQ ID NO 66372
  misc_feature (1)..(1433): Ortholog of  Ceres SEQ ID NO 12625899 as cited in SEQ ID NO 69079
  misc_feature (1)..(1433): Ortholog of  Ceres SEQ ID NO 15180051 as cited in SEQ ID NO 0

SEQ ID NO: 110651 - protein, 408 aa, Arabidopsis thaliana; identical to SEQ ID NO: 99412
  peptide (1)..(408): Ceres Seq. ID no. 13602835

SEQ ID NO: 110652 - protein, 385 aa, Arabidopsis thaliana; identical to SEQ ID NO: 35905
  peptide (1)..(385): Ceres Seq. ID no. 13602836

SEQ ID NO: 110653 - protein, 331 aa, Arabidopsis thaliana; identical to SEQ ID NO: 35906
  peptide (1)..(331): Ceres Seq. ID no. 13602837

SEQ ID NO: 110654 - DNA, 702 bp, Arabidopsis thaliana; identical to SEQ ID NO: 99415
  misc_feature (1)..(702): Ceres Seq. ID no. 13602838
  misc_feature (1)..(702): Ortholog of  Ceres SEQ ID NO 13638986 as cited in SEQ ID NO 56098

SEQ ID NO: 110655 - protein, 136 aa, Arabidopsis thaliana; identical to SEQ ID NO: 21190
  peptide (1)..(136): Ceres Seq. ID no. 13602839

SEQ ID NO: 110656 - protein, 104 aa, Arabidopsis thaliana; identical to SEQ ID NO: 21191
  peptide (1)..(104): Ceres Seq. ID no. 13602840

SEQ ID NO: 110657 - DNA, 989 bp, Arabidopsis thaliana; identical to SEQ ID NO: 99418
  misc_feature (1)..(989): Ceres Seq. ID no. 13602841
  misc_feature (1)..(989): Ortholog of  Ceres SEQ ID NO 13594193 as cited in SEQ ID NO 58558
  misc_feature (1)..(989): Ortholog of  Ceres SEQ ID NO 15177545 as cited in SEQ ID NO 0

SEQ ID NO: 110658 - protein, 288 aa, Arabidopsis thaliana; identical to SEQ ID NO: 99419
  peptide (1)..(288): Ceres Seq. ID no. 13602842

SEQ ID NO: 110659 - protein, 197 aa, Arabidopsis thaliana; identical to SEQ ID NO: 99420
  peptide (1)..(197): Ceres Seq. ID no. 13602843

SEQ ID NO: 110660 - DNA, 1094 bp, Arabidopsis thaliana; identical to SEQ ID NO: 99421
  misc_feature (1)..(1094): Ceres Seq. ID no. 13602855
  misc_feature (1)..(1094): Ortholog of  Ceres SEQ ID NO 14304941 as cited in SEQ ID NO 53358
  misc_feature (1)..(1094): Ortholog of  Ceres SEQ ID NO 15176197 as cited in SEQ ID NO 58416

SEQ ID NO: 110661 - protein, 281 aa, Arabidopsis thaliana; identical to SEQ ID NO: 99422
  peptide (1)..(281): Ceres Seq. ID no. 13602856

SEQ ID NO: 110662 - DNA, 1489 bp, Arabidopsis thaliana; identical to SEQ ID NO: 99423
  misc_feature (1)..(1489): Ceres Seq. ID no. 13602857
  misc_feature (1)..(1489): Ortholog of  Ceres SEQ ID NO 15169655 as cited in SEQ ID NO 64922
  misc_feature (1)..(1489): Ortholog of  Ceres SEQ ID NO 13596004 as cited in SEQ ID NO 68212

SEQ ID NO: 110663 - protein, 406 aa, Arabidopsis thaliana; identical to SEQ ID NO: 24500
  peptide (1)..(406): Ceres Seq. ID no. 13602858

SEQ ID NO: 110664 - protein, 307 aa, Arabidopsis thaliana; identical to SEQ ID NO: 24501
  peptide (1)..(307): Ceres Seq. ID no. 13602859

SEQ ID NO: 110665 - protein, 298 aa, Arabidopsis thaliana; identical to SEQ ID NO: 24502
  peptide (1)..(298): Ceres Seq. ID no. 13602860

SEQ ID NO: 110666 - DNA, 1464 bp, Arabidopsis thaliana; identical to SEQ ID NO: 99427
  misc_feature (1)..(1464): Ceres Seq. ID no. 13602875
  misc_feature (1)..(1464): Ortholog of  Ceres SEQ ID NO 14311882 as cited in SEQ ID NO 51638
  misc_feature (1)..(1464): Ortholog of  Ceres SEQ ID NO 14308803 as cited in SEQ ID NO 55038
  misc_feature (1)..(1464): Ortholog of  Ceres SEQ ID NO 13595437 as cited in SEQ ID NO 56562

SEQ ID NO: 110667 - protein, 348 aa, Arabidopsis thaliana; identical to SEQ ID NO: 36793
  peptide (1)..(348): Ceres Seq. ID no. 13602876

SEQ ID NO: 110668 - protein, 342 aa, Arabidopsis thaliana; identical to SEQ ID NO: 36794
  peptide (1)..(342): Ceres Seq. ID no. 13602877

SEQ ID NO: 110669 - protein, 264 aa, Arabidopsis thaliana; identical to SEQ ID NO: 36795
  peptide (1)..(264): Ceres Seq. ID no. 13602878

SEQ ID NO: 110670 - DNA, 976 bp, Arabidopsis thaliana; identical to SEQ ID NO: 99431
  misc_feature (1)..(976): Ceres Seq. ID no. 13610689
  misc_feature (1)..(976): Ortholog of  Ceres SEQ ID NO 15174024 as cited in SEQ ID NO 0

SEQ ID NO: 110671 - protein, 173 aa, Arabidopsis thaliana; identical to SEQ ID NO: 99432
  peptide (1)..(173): Ceres Seq. ID no. 13610690

SEQ ID NO: 110672 - DNA, 746 bp, Arabidopsis thaliana; identical to SEQ ID NO: 99433
  misc_feature (1)..(746): Ceres Seq. ID no. 13602891
  misc_feature (1)..(746): Ortholog of  Ceres SEQ ID NO 13594766 as cited in SEQ ID NO 51913
  misc_feature (1)..(746): Ortholog of  Ceres SEQ ID NO 12609226 as cited in SEQ ID NO 59300
  misc_feature (1)..(746): Ortholog of  Ceres SEQ ID NO 13654942 as cited in SEQ ID NO 62533
  misc_feature (1)..(746): Ortholog of  Ceres SEQ ID NO 13599195 as cited in SEQ ID NO 0

SEQ ID NO: 110673 - protein, 166 aa, Arabidopsis thaliana; identical to SEQ ID NO: 26434
  peptide (1)..(166): Ceres Seq. ID no. 13602892

SEQ ID NO: 110674 - DNA, 1370 bp, Arabidopsis thaliana; identical to SEQ ID NO: 99435
  misc_feature (1)..(1370): Ceres Seq. ID no. 13602929
  misc_feature (1)..(1370): Ortholog of  Ceres SEQ ID NO 13655988 as cited in SEQ ID NO 65557

SEQ ID NO: 110675 - protein, 398 aa, Arabidopsis thaliana; identical to SEQ ID NO: 43642
  peptide (1)..(398): Ceres Seq. ID no. 13602930

SEQ ID NO: 110676 - protein, 344 aa, Arabidopsis thaliana; identical to SEQ ID NO: 43643
  peptide (1)..(344): Ceres Seq. ID no. 13602931

SEQ ID NO: 110677 - protein, 330 aa, Arabidopsis thaliana; identical to SEQ ID NO: 43644
  peptide (1)..(330): Ceres Seq. ID no. 13602932

SEQ ID NO: 110678 - DNA, 1577 bp, Arabidopsis thaliana; identical to SEQ ID NO: 99439
  misc_feature (1)..(1577): Ceres Seq. ID no. 13602933
  misc_feature (1)..(1577): Ortholog of  Ceres SEQ ID NO 13596807 as cited in SEQ ID NO 62275

SEQ ID NO: 110679 - protein, 412 aa, Arabidopsis thaliana; identical to SEQ ID NO: 99440
  peptide (1)..(412): Ceres Seq. ID no. 13602934

SEQ ID NO: 110680 - protein, 401 aa, Arabidopsis thaliana; identical to SEQ ID NO: 99441
  peptide (1)..(401): Ceres Seq. ID no. 13602935

SEQ ID NO: 110681 - protein, 348 aa, Arabidopsis thaliana; identical to SEQ ID NO: 99442
  peptide (1)..(348): Ceres Seq. ID no. 13602936

SEQ ID NO: 110682 - DNA, 1032 bp, Arabidopsis thaliana; identical to SEQ ID NO: 99443
  misc_feature (1)..(1032): Ceres Seq. ID no. 13602937
  misc_feature (1)..(1032): Ortholog of  Ceres SEQ ID NO 14312391 as cited in SEQ ID NO 55070

SEQ ID NO: 110683 - protein, 302 aa, Arabidopsis thaliana; identical to SEQ ID NO: 30333
  peptide (1)..(302): Ceres Seq. ID no. 13602938

SEQ ID NO: 110684 - protein, 284 aa, Arabidopsis thaliana; identical to SEQ ID NO: 30334
  peptide (1)..(284): Ceres Seq. ID no. 13602939

SEQ ID NO: 110685 - DNA, 2331 bp, Arabidopsis thaliana; identical to SEQ ID NO: 99446
  misc_feature (1)..(2331): Ceres Seq. ID no. 13602940
  misc_feature (1)..(2331): Ortholog of  Ceres SEQ ID NO 14312594 as cited in SEQ ID NO 58686
  misc_feature (1)..(2331): Ortholog of  Ceres SEQ ID NO 13597706 as cited in SEQ ID NO 65326

SEQ ID NO: 110686 - protein, 660 aa, Arabidopsis thaliana; identical to SEQ ID NO: 99447
  peptide (1)..(660): Ceres Seq. ID no. 13602941

SEQ ID NO: 110687 - protein, 601 aa, Arabidopsis thaliana; identical to SEQ ID NO: 99448
  peptide (1)..(601): Ceres Seq. ID no. 13602942

SEQ ID NO: 110688 - protein, 586 aa, Arabidopsis thaliana; identical to SEQ ID NO: 99449
  peptide (1)..(586): Ceres Seq. ID no. 13602943

SEQ ID NO: 110689 - DNA, 1302 bp, Arabidopsis thaliana; identical to SEQ ID NO: 99450
  misc_feature (1)..(1302): Ceres Seq. ID no. 13602944
  misc_feature (1)..(1302): Ortholog of  Ceres SEQ ID NO 15225707 as cited in SEQ ID NO 54212
  misc_feature (1)..(1302): Ortholog of  Ceres SEQ ID NO 14308608 as cited in SEQ ID NO 58855
  misc_feature (1)..(1302): Ortholog of  Ceres SEQ ID NO 14303684 as cited in SEQ ID NO 66254

SEQ ID NO: 110690 - protein, 337 aa, Arabidopsis thaliana; identical to SEQ ID NO: 40414
  peptide (1)..(337): Ceres Seq. ID no. 13602945

SEQ ID NO: 110691 - protein, 302 aa, Arabidopsis thaliana; identical to SEQ ID NO: 40415
  peptide (1)..(302): Ceres Seq. ID no. 13602946

SEQ ID NO: 110692 - protein, 173 aa, Arabidopsis thaliana; identical to SEQ ID NO: 40416
  peptide (1)..(173): Ceres Seq. ID no. 13602947

SEQ ID NO: 110693 - DNA, 1208 bp, Arabidopsis thaliana; identical to SEQ ID NO: 99454
  misc_feature (1)..(1208): Ceres Seq. ID no. 13602960
  misc_feature (1)..(1208): Ortholog of  Ceres SEQ ID NO 13658153 as cited in SEQ ID NO 66326

SEQ ID NO: 110694 - protein, 388 aa, Arabidopsis thaliana; identical to SEQ ID NO: 99455
  peptide (1)..(388): Ceres Seq. ID no. 13602961

SEQ ID NO: 110695 - protein, 386 aa, Arabidopsis thaliana; identical to SEQ ID NO: 99456
  peptide (1)..(386): Ceres Seq. ID no. 13602962

SEQ ID NO: 110696 - protein, 374 aa, Arabidopsis thaliana; identical to SEQ ID NO: 99457
  peptide (1)..(374): Ceres Seq. ID no. 13602963

SEQ ID NO: 110697 - DNA, 1624 bp, Arabidopsis thaliana; identical to SEQ ID NO: 99458
  misc_feature (1)..(1624): Ceres Seq. ID no. 13602968
  misc_feature (1)..(1624): Ortholog of  Ceres SEQ ID NO 15172560 as cited in SEQ ID NO 57325
  misc_feature (1)..(1624): Ortholog of  Ceres SEQ ID NO 13655716 as cited in SEQ ID NO 68965

SEQ ID NO: 110698 - protein, 405 aa, Arabidopsis thaliana; identical to SEQ ID NO: 99459
  peptide (1)..(405): Ceres Seq. ID no. 13602969

SEQ ID NO: 110699 - protein, 283 aa, Arabidopsis thaliana; identical to SEQ ID NO: 99460
  peptide (1)..(283): Ceres Seq. ID no. 13602970

SEQ ID NO: 110700 - protein, 282 aa, Arabidopsis thaliana; identical to SEQ ID NO: 99461
  peptide (1)..(282): Ceres Seq. ID no. 13602971

SEQ ID NO: 110701 - DNA, 1997 bp, Arabidopsis thaliana; identical to SEQ ID NO: 99462
  misc_feature (1)..(1997): Ceres Seq. ID no. 13602972
  misc_feature (1)..(1997): Ortholog of  Ceres SEQ ID NO 14313739 as cited in SEQ ID NO 54143
  misc_feature (1)..(1997): Ortholog of  Ceres SEQ ID NO 14308217 as cited in SEQ ID NO 58569

SEQ ID NO: 110702 - protein, 649 aa, Arabidopsis thaliana; identical to SEQ ID NO: 99463
  peptide (1)..(649): Ceres Seq. ID no. 13602973

SEQ ID NO: 110703 - protein, 639 aa, Arabidopsis thaliana; identical to SEQ ID NO: 99464
  peptide (1)..(639): Ceres Seq. ID no. 13602974

SEQ ID NO: 110704 - protein, 635 aa, Arabidopsis thaliana; identical to SEQ ID NO: 99465
  peptide (1)..(635): Ceres Seq. ID no. 13602975

SEQ ID NO: 110705 - DNA, 868 bp, Arabidopsis thaliana; identical to SEQ ID NO: 99466
  misc_feature (1)..(868): Ceres Seq. ID no. 13602979
  misc_feature (1)..(868): Ortholog of  Ceres SEQ ID NO 12626248 as cited in SEQ ID NO 65768

SEQ ID NO: 110706 - protein, 222 aa, Arabidopsis thaliana; identical to SEQ ID NO: 99467
  peptide (1)..(222): Ceres Seq. ID no. 13602980

SEQ ID NO: 110707 - protein, 210 aa, Arabidopsis thaliana; identical to SEQ ID NO: 37214
  peptide (1)..(210): Ceres Seq. ID no. 13602981

SEQ ID NO: 110708 - protein, 128 aa, Arabidopsis thaliana; identical to SEQ ID NO: 37215
  peptide (1)..(128): Ceres Seq. ID no. 13602982

SEQ ID NO: 110709 - DNA, 2140 bp, Arabidopsis thaliana; identical to SEQ ID NO: 99470
  misc_feature (1)..(2140): Ceres Seq. ID no. 13602999
  misc_feature (1)..(2140): Ortholog of  Ceres SEQ ID NO 14307728 as cited in SEQ ID NO 54710

SEQ ID NO: 110710 - protein, 623 aa, Arabidopsis thaliana; identical to SEQ ID NO: 99471
  peptide (1)..(623): Ceres Seq. ID no. 13603000

SEQ ID NO: 110711 - protein, 529 aa, Arabidopsis thaliana; identical to SEQ ID NO: 99472
  peptide (1)..(529): Ceres Seq. ID no. 13603001

SEQ ID NO: 110712 - protein, 446 aa, Arabidopsis thaliana; identical to SEQ ID NO: 99473
  peptide (1)..(446): Ceres Seq. ID no. 13603002

SEQ ID NO: 110713 - DNA, 973 bp, Arabidopsis thaliana; identical to SEQ ID NO: 99474
  misc_feature (1)..(973): Ceres Seq. ID no. 13603003
  misc_feature (1)..(973): Ortholog of  Ceres SEQ ID NO 13581804 as cited in SEQ ID NO 51424
  misc_feature (1)..(973): Ortholog of  Ceres SEQ ID NO 13663874 as cited in SEQ ID NO 67003

SEQ ID NO: 110714 - protein, 202 aa, Arabidopsis thaliana; identical to SEQ ID NO: 99475
  peptide (1)..(202): Ceres Seq. ID no. 13603004

SEQ ID NO: 110715 - protein, 157 aa, Arabidopsis thaliana; identical to SEQ ID NO: 99476
  peptide (1)..(157): Ceres Seq. ID no. 13603005

SEQ ID NO: 110716 - protein, 108 aa, Arabidopsis thaliana; identical to SEQ ID NO: 99477
  peptide (1)..(108): Ceres Seq. ID no. 13603006

SEQ ID NO: 110717 - DNA, 1156 bp, Arabidopsis thaliana; identical to SEQ ID NO: 99478
  misc_feature (1)..(1156): Ceres Seq. ID no. 13603007
  misc_feature (1)..(1156): Ortholog of  Ceres SEQ ID NO 15168580 as cited in SEQ ID NO 60279

SEQ ID NO: 110718 - protein, 293 aa, Arabidopsis thaliana; identical to SEQ ID NO: 99479
  peptide (1)..(293): Ceres Seq. ID no. 13603008

SEQ ID NO: 110719 - protein, 275 aa, Arabidopsis thaliana; identical to SEQ ID NO: 99480
  peptide (1)..(275): Ceres Seq. ID no. 13603009

SEQ ID NO: 110720 - protein, 261 aa, Arabidopsis thaliana; identical to SEQ ID NO: 99481
  peptide (1)..(261): Ceres Seq. ID no. 13603010

SEQ ID NO: 110721 - DNA, 1305 bp, Arabidopsis thaliana; identical to SEQ ID NO: 99482
  misc_feature (1)..(1305): Ceres Seq. ID no. 13603034
  misc_feature (1)..(1305): Ortholog of  Ceres SEQ ID NO 15224874 as cited in SEQ ID NO 55015

SEQ ID NO: 110722 - protein, 385 aa, Arabidopsis thaliana; identical to SEQ ID NO: 99483
  peptide (1)..(385): Ceres Seq. ID no. 13603035

SEQ ID NO: 110723 - protein, 355 aa, Arabidopsis thaliana; identical to SEQ ID NO: 99484
  peptide (1)..(355): Ceres Seq. ID no. 13603036

SEQ ID NO: 110724 - protein, 353 aa, Arabidopsis thaliana; identical to SEQ ID NO: 99485
  peptide (1)..(353): Ceres Seq. ID no. 13603037

SEQ ID NO: 110725 - DNA, 5045 bp, Arabidopsis thaliana; identical to SEQ ID NO: 99486
  misc_feature (1)..(5045): Ceres Seq. ID no. 13603040
  misc_feature (1)..(5045): Ortholog of  Ceres SEQ ID NO 13635680 as cited in SEQ ID NO 578

SEQ ID NO: 110726 - protein, 1482 aa, Arabidopsis thaliana; identical to SEQ ID NO: 99487
  peptide (1)..(1482): Ceres Seq. ID no. 13603041

SEQ ID NO: 110727 - protein, 1394 aa, Arabidopsis thaliana; identical to SEQ ID NO: 99488
  peptide (1)..(1394): Ceres Seq. ID no. 13603042

SEQ ID NO: 110728 - protein, 1331 aa, Arabidopsis thaliana; identical to SEQ ID NO: 99489
  peptide (1)..(1331): Ceres Seq. ID no. 13603043

SEQ ID NO: 110729 - DNA, 1003 bp, Arabidopsis thaliana; identical to SEQ ID NO: 99490
  misc_feature (1)..(1003): Ceres Seq. ID no. 13603052
  misc_feature (1)..(1003): Ortholog of  Ceres SEQ ID NO 12626061 as cited in SEQ ID NO 64594
  misc_feature (1)..(1003): Ortholog of  Ceres SEQ ID NO 15174020 as cited in SEQ ID NO 0
  misc_feature (1)..(1003): Ortholog of  Ceres SEQ ID NO 15179151 as cited in SEQ ID NO 0

SEQ ID NO: 110730 - protein, 237 aa, Arabidopsis thaliana; identical to SEQ ID NO: 29663
  peptide (1)..(237): Ceres Seq. ID no. 13603053

SEQ ID NO: 110731 - protein, 162 aa, Arabidopsis thaliana; identical to SEQ ID NO: 29664
  peptide (1)..(162): Ceres Seq. ID no. 13603054

SEQ ID NO: 110732 - protein, 149 aa, Arabidopsis thaliana; identical to SEQ ID NO: 29665
  peptide (1)..(149): Ceres Seq. ID no. 13603055

SEQ ID NO: 110733 - DNA, 1970 bp, Arabidopsis thaliana; identical to SEQ ID NO: 99494
  misc_feature (1)..(1970): Ceres Seq. ID no. 13603059
  misc_feature (1)..(1970): Ortholog of  Ceres SEQ ID NO 12626078 as cited in SEQ ID NO 69113

SEQ ID NO: 110734 - protein, 572 aa, Arabidopsis thaliana; identical to SEQ ID NO: 99495
  peptide (1)..(572): Ceres Seq. ID no. 13603060

SEQ ID NO: 110735 - protein, 527 aa, Arabidopsis thaliana; identical to SEQ ID NO: 99496
  peptide (1)..(527): Ceres Seq. ID no. 13603061

SEQ ID NO: 110736 - protein, 512 aa, Arabidopsis thaliana; identical to SEQ ID NO: 99497
  peptide (1)..(512): Ceres Seq. ID no. 13603062

SEQ ID NO: 110737 - DNA, 1719 bp, Arabidopsis thaliana; identical to SEQ ID NO: 99498
  misc_feature (1)..(1719): Ceres Seq. ID no. 13603083
  misc_feature (1)..(1719): Ortholog of  Ceres SEQ ID NO 15174513 as cited in SEQ ID NO 58979
  misc_feature (1)..(1719): Ortholog of  Ceres SEQ ID NO 13584616 as cited in SEQ ID NO 65234
  misc_feature (1)..(1719): Ortholog of  Ceres SEQ ID NO 15178939 as cited in SEQ ID NO 0

SEQ ID NO: 110738 - protein, 427 aa, Arabidopsis thaliana; identical to SEQ ID NO: 24120
  peptide (1)..(427): Ceres Seq. ID no. 13603084

SEQ ID NO: 110739 - protein, 410 aa, Arabidopsis thaliana; identical to SEQ ID NO: 24121
  peptide (1)..(410): Ceres Seq. ID no. 13603085

SEQ ID NO: 110740 - protein, 409 aa, Arabidopsis thaliana; identical to SEQ ID NO: 24122
  peptide (1)..(409): Ceres Seq. ID no. 13603086

SEQ ID NO: 110741 - DNA, 866 bp, Arabidopsis thaliana; identical to SEQ ID NO: 99502
  misc_feature (1)..(866): Ceres Seq. ID no. 13603091
  misc_feature (1)..(866): Ortholog of  Ceres SEQ ID NO 13638889 as cited in SEQ ID NO 55831

SEQ ID NO: 110742 - protein, 193 aa, Arabidopsis thaliana; identical to SEQ ID NO: 99503
  peptide (1)..(193): Ceres Seq. ID no. 13603092

SEQ ID NO: 110743 - protein, 190 aa, Arabidopsis thaliana; identical to SEQ ID NO: 99504
  peptide (1)..(190): Ceres Seq. ID no. 13603093

SEQ ID NO: 110744 - protein, 184 aa, Arabidopsis thaliana; identical to SEQ ID NO: 99505
  peptide (1)..(184): Ceres Seq. ID no. 13603094

SEQ ID NO: 110745 - DNA, 1636 bp, Arabidopsis thaliana; identical to SEQ ID NO: 99506
  misc_feature (1)..(1636): Ceres Seq. ID no. 13603095
  misc_feature (1)..(1636): Ortholog of  Ceres SEQ ID NO 12625120 as cited in SEQ ID NO 67706
  misc_feature (1)..(1636): Ortholog of  Ceres SEQ ID NO 13595999 as cited in SEQ ID NO 68173

SEQ ID NO: 110746 - protein, 379 aa, Arabidopsis thaliana; identical to SEQ ID NO: 43320
  peptide (1)..(379): Ceres Seq. ID no. 13603096

SEQ ID NO: 110747 - DNA, 2395 bp, Arabidopsis thaliana; identical to SEQ ID NO: 99508
  misc_feature (1)..(2395): Ceres Seq. ID no. 13603097
  misc_feature (1)..(2395): Ortholog of  Ceres SEQ ID NO 13584744 as cited in SEQ ID NO 69137

SEQ ID NO: 110748 - protein, 738 aa, Arabidopsis thaliana; identical to SEQ ID NO: 39643
  peptide (1)..(738): Ceres Seq. ID no. 13603098

SEQ ID NO: 110749 - protein, 717 aa, Arabidopsis thaliana; identical to SEQ ID NO: 39644
  peptide (1)..(717): Ceres Seq. ID no. 13603099

SEQ ID NO: 110750 - protein, 680 aa, Arabidopsis thaliana; identical to SEQ ID NO: 39645
  peptide (1)..(680): Ceres Seq. ID no. 13603100

SEQ ID NO: 110751 - DNA, 1431 bp, Arabidopsis thaliana; identical to SEQ ID NO: 99512
  misc_feature (1)..(1431): Ceres Seq. ID no. 13603101
  misc_feature (1)..(1431): Ortholog of  Ceres SEQ ID NO 15171293 as cited in SEQ ID NO 51744

SEQ ID NO: 110752 - protein, 385 aa, Arabidopsis thaliana; identical to SEQ ID NO: 99513
  peptide (1)..(385): Ceres Seq. ID no. 13603102

SEQ ID NO: 110753 - protein, 367 aa, Arabidopsis thaliana; identical to SEQ ID NO: 25861
  peptide (1)..(367): Ceres Seq. ID no. 13603103

SEQ ID NO: 110754 - protein, 348 aa, Arabidopsis thaliana; identical to SEQ ID NO: 25862
  peptide (1)..(348): Ceres Seq. ID no. 13603104

SEQ ID NO: 110755 - DNA, 1073 bp, Arabidopsis thaliana; identical to SEQ ID NO: 99516
  misc_feature (1)..(1073): Ceres Seq. ID no. 13603112
  misc_feature (1)..(1073): Ortholog of  Ceres SEQ ID NO 15176807 as cited in SEQ ID NO 0

SEQ ID NO: 110756 - protein, 243 aa, Arabidopsis thaliana; identical to SEQ ID NO: 99517
  peptide (1)..(243): Ceres Seq. ID no. 13603113

SEQ ID NO: 110757 - DNA, 1404 bp, Arabidopsis thaliana; identical to SEQ ID NO: 99518
  misc_feature (1)..(1404): Ceres Seq. ID no. 13603114
  misc_feature (1)..(1404): Ortholog of  Ceres SEQ ID NO 13596370 as cited in SEQ ID NO 68071

SEQ ID NO: 110758 - protein, 366 aa, Arabidopsis thaliana; identical to SEQ ID NO: 22703
  peptide (1)..(366): Ceres Seq. ID no. 13603115

SEQ ID NO: 110759 - protein, 363 aa, Arabidopsis thaliana; identical to SEQ ID NO: 22704
  peptide (1)..(363): Ceres Seq. ID no. 13603116

SEQ ID NO: 110760 - DNA, 1751 bp, Arabidopsis thaliana; identical to SEQ ID NO: 99521
  misc_feature (1)..(1751): Ceres Seq. ID no. 13603121
  misc_feature (1)..(1751): Ortholog of  Ceres SEQ ID NO 14308625 as cited in SEQ ID NO 55009

SEQ ID NO: 110761 - protein, 538 aa, Arabidopsis thaliana; identical to SEQ ID NO: 99522
  peptide (1)..(538): Ceres Seq. ID no. 13603122

SEQ ID NO: 110762 - protein, 519 aa, Arabidopsis thaliana; identical to SEQ ID NO: 99523
  peptide (1)..(519): Ceres Seq. ID no. 13603123

SEQ ID NO: 110763 - protein, 444 aa, Arabidopsis thaliana; identical to SEQ ID NO: 99524
  peptide (1)..(444): Ceres Seq. ID no. 13603124

SEQ ID NO: 110764 - DNA, 1060 bp, Arabidopsis thaliana; identical to SEQ ID NO: 99525
  misc_feature (1)..(1060): Ceres Seq. ID no. 13603125
  misc_feature (1)..(1060): Ortholog of  Ceres SEQ ID NO 12608863 as cited in SEQ ID NO 51470
  misc_feature (1)..(1060): Ortholog of  Ceres SEQ ID NO 13639221 as cited in SEQ ID NO 56429
  misc_feature (1)..(1060): Ortholog of  Ceres SEQ ID NO 14302493 as cited in SEQ ID NO 67957
  misc_feature (1)..(1060): Ortholog of  Ceres SEQ ID NO 13624608 as cited in SEQ ID NO 0

SEQ ID NO: 110765 - protein, 222 aa, Arabidopsis thaliana; identical to SEQ ID NO: 35375
  peptide (1)..(222): Ceres Seq. ID no. 13603126

SEQ ID NO: 110766 - protein, 219 aa, Arabidopsis thaliana; identical to SEQ ID NO: 35376
  peptide (1)..(219): Ceres Seq. ID no. 13603127

SEQ ID NO: 110767 - DNA, 1413 bp, Arabidopsis thaliana; identical to SEQ ID NO: 99528
  misc_feature (1)..(1413): Ceres Seq. ID no. 13603136
  misc_feature (1)..(1413): Ortholog of  Ceres SEQ ID NO 13596780 as cited in SEQ ID NO 62360

SEQ ID NO: 110768 - protein, 361 aa, Arabidopsis thaliana; identical to SEQ ID NO: 29321
  peptide (1)..(361): Ceres Seq. ID no. 13603137

SEQ ID NO: 110769 - DNA, 1912 bp, Arabidopsis thaliana; identical to SEQ ID NO: 99530
  misc_feature (1)..(1912): Ceres Seq. ID no. 13603138
  misc_feature (1)..(1912): Ortholog of  Ceres SEQ ID NO 13594037 as cited in SEQ ID NO 55666
  misc_feature (1)..(1912): Ortholog of  Ceres SEQ ID NO 13657707 as cited in SEQ ID NO 66407

SEQ ID NO: 110770 - protein, 560 aa, Arabidopsis thaliana; identical to SEQ ID NO: 99531
  peptide (1)..(560): Ceres Seq. ID no. 13603139

SEQ ID NO: 110771 - protein, 555 aa, Arabidopsis thaliana; identical to SEQ ID NO: 99532
  peptide (1)..(555): Ceres Seq. ID no. 13603140

SEQ ID NO: 110772 - protein, 481 aa, Arabidopsis thaliana; identical to SEQ ID NO: 39933
  peptide (1)..(481): Ceres Seq. ID no. 13603141

SEQ ID NO: 110773 - DNA, 1089 bp, Arabidopsis thaliana; identical to SEQ ID NO: 99534
  misc_feature (1)..(1089): Ceres Seq. ID no. 13603142
  misc_feature (1)..(1089): Ortholog of  Ceres SEQ ID NO 15172862 as cited in SEQ ID NO 51943
  misc_feature (1)..(1089): Ortholog of  Ceres SEQ ID NO 12784852 as cited in SEQ ID NO 61543

SEQ ID NO: 110774 - protein, 278 aa, Arabidopsis thaliana; identical to SEQ ID NO: 99535
  peptide (1)..(278): Ceres Seq. ID no. 13603143

SEQ ID NO: 110775 - protein, 257 aa, Arabidopsis thaliana; identical to SEQ ID NO: 27385
  peptide (1)..(257): Ceres Seq. ID no. 13603144

SEQ ID NO: 110776 - DNA, 1456 bp, Arabidopsis thaliana; identical to SEQ ID NO: 99537
  misc_feature (1)..(1456): Ceres Seq. ID no. 13603173
  misc_feature (1)..(1456): Ortholog of  Ceres SEQ ID NO 14313155 as cited in SEQ ID NO 54706
  misc_feature (1)..(1456): Ortholog of  Ceres SEQ ID NO 13639022 as cited in SEQ ID NO 59811

SEQ ID NO: 110777 - protein, 390 aa, Arabidopsis thaliana; identical to SEQ ID NO: 99538
  peptide (1)..(390): Ceres Seq. ID no. 13603174

SEQ ID NO: 110778 - protein, 354 aa, Arabidopsis thaliana; identical to SEQ ID NO: 41938
  peptide (1)..(354): Ceres Seq. ID no. 13603175

SEQ ID NO: 110779 - protein, 317 aa, Arabidopsis thaliana; identical to SEQ ID NO: 41939
  peptide (1)..(317): Ceres Seq. ID no. 13603176

SEQ ID NO: 110780 - DNA, 1342 bp, Arabidopsis thaliana; identical to SEQ ID NO: 99541
  misc_feature (1)..(1342): Ceres Seq. ID no. 13603177
  misc_feature (1)..(1342): Ortholog of  Ceres SEQ ID NO 13654187 as cited in SEQ ID NO 68219

SEQ ID NO: 110781 - protein, 386 aa, Arabidopsis thaliana; identical to SEQ ID NO: 99542
  peptide (1)..(386): Ceres Seq. ID no. 13603178

SEQ ID NO: 110782 - protein, 354 aa, Arabidopsis thaliana; identical to SEQ ID NO: 40785
  peptide (1)..(354): Ceres Seq. ID no. 13603179

SEQ ID NO: 110783 - protein, 353 aa, Arabidopsis thaliana; identical to SEQ ID NO: 40786
  peptide (1)..(353): Ceres Seq. ID no. 13603180

SEQ ID NO: 110784 - DNA, 661 bp, Arabidopsis thaliana; identical to SEQ ID NO: 99545
  misc_feature (1)..(661): Ceres Seq. ID no. 13603181
  misc_feature (1)..(661): Ortholog of  Ceres SEQ ID NO 12623585 as cited in SEQ ID NO 60992
  misc_feature (1)..(661): Ortholog of  Ceres SEQ ID NO 12625545 as cited in SEQ ID NO 63154

SEQ ID NO: 110785 - protein, 148 aa, Arabidopsis thaliana; identical to SEQ ID NO: 37084
  peptide (1)..(148): Ceres Seq. ID no. 13603182

SEQ ID NO: 110786 - protein, 127 aa, Arabidopsis thaliana; identical to SEQ ID NO: 37085
  peptide (1)..(127): Ceres Seq. ID no. 13603183

SEQ ID NO: 110787 - protein, 107 aa, Arabidopsis thaliana; identical to SEQ ID NO: 37086
  peptide (1)..(107): Ceres Seq. ID no. 13603184

SEQ ID NO: 110788 - DNA, 995 bp, Arabidopsis thaliana; identical to SEQ ID NO: 99549
  misc_feature (1)..(995): Ceres Seq. ID no. 13603185
  misc_feature (1)..(995): Ortholog of  Ceres SEQ ID NO 14311773 as cited in SEQ ID NO 59245
  misc_feature (1)..(995): Ortholog of  Ceres SEQ ID NO 15225880 as cited in SEQ ID NO 0

SEQ ID NO: 110789 - protein, 217 aa, Arabidopsis thaliana; identical to SEQ ID NO: 99550
  peptide (1)..(217): Ceres Seq. ID no. 13603186

SEQ ID NO: 110790 - protein, 180 aa, Arabidopsis thaliana; identical to SEQ ID NO: 99551
  peptide (1)..(180): Ceres Seq. ID no. 13603187

SEQ ID NO: 110791 - protein, 179 aa, Arabidopsis thaliana; identical to SEQ ID NO: 99552
  peptide (1)..(179): Ceres Seq. ID no. 13603188

SEQ ID NO: 110792 - DNA, 1030 bp, Arabidopsis thaliana; identical to SEQ ID NO: 99553
  misc_feature (1)..(1030): Ceres Seq. ID no. 13603189
  misc_feature (1)..(1030): Ortholog of  Ceres SEQ ID NO 13594700 as cited in SEQ ID NO 51982
  misc_feature (1)..(1030): Ortholog of  Ceres SEQ ID NO 14309538 as cited in SEQ ID NO 52606

SEQ ID NO: 110793 - protein, 198 aa, Arabidopsis thaliana; identical to SEQ ID NO: 29617
  peptide (1)..(198): Ceres Seq. ID no. 13603190

SEQ ID NO: 110794 - protein, 167 aa, Arabidopsis thaliana; identical to SEQ ID NO: 29618
  peptide (1)..(167): Ceres Seq. ID no. 13603191

SEQ ID NO: 110795 - DNA, 1525 bp, Arabidopsis thaliana; identical to SEQ ID NO: 99556
  misc_feature (1)..(1525): Ceres Seq. ID no. 13603204
  misc_feature (1)..(1525): Ortholog of  Ceres SEQ ID NO 15172446 as cited in SEQ ID NO 60392

SEQ ID NO: 110796 - protein, 460 aa, Arabidopsis thaliana; identical to SEQ ID NO: 41316
  peptide (1)..(460): Ceres Seq. ID no. 13603205

SEQ ID NO: 110797 - protein, 414 aa, Arabidopsis thaliana; identical to SEQ ID NO: 41317
  peptide (1)..(414): Ceres Seq. ID no. 13603206

SEQ ID NO: 110798 - protein, 355 aa, Arabidopsis thaliana; identical to SEQ ID NO: 41318
  peptide (1)..(355): Ceres Seq. ID no. 13603207

SEQ ID NO: 110799 - DNA, 1196 bp, Arabidopsis thaliana; identical to SEQ ID NO: 99560
  misc_feature (1)..(1196): Ceres Seq. ID no. 13603208
  misc_feature (1)..(1196): Ortholog of  Ceres SEQ ID NO 14304969 as cited in SEQ ID NO 53193
  misc_feature (1)..(1196): Ortholog of  Ceres SEQ ID NO 14314851 as cited in SEQ ID NO 54014
  misc_feature (1)..(1196): Ortholog of  Ceres SEQ ID NO 14307442 as cited in SEQ ID NO 54239
  misc_feature (1)..(1196): Ortholog of  Ceres SEQ ID NO 13638897 as cited in SEQ ID NO 55839
  misc_feature (1)..(1196): Ortholog of  Ceres SEQ ID NO 14302561 as cited in SEQ ID NO 56543
  misc_feature (1)..(1196): Ortholog of  Ceres SEQ ID NO 15177758 as cited in SEQ ID NO 57504
  misc_feature (1)..(1196): Ortholog of  Ceres SEQ ID NO 15177710 as cited in SEQ ID NO 59217
  misc_feature (1)..(1196): Ortholog of  Ceres SEQ ID NO 13596958 as cited in SEQ ID NO 63319
  misc_feature (1)..(1196): Ortholog of  Ceres SEQ ID NO 12614814 as cited in SEQ ID NO 68816

SEQ ID NO: 110800 - protein, 243 aa, Arabidopsis thaliana; identical to SEQ ID NO: 24397
  peptide (1)..(243): Ceres Seq. ID no. 13603209

SEQ ID NO: 110801 - protein, 238 aa, Arabidopsis thaliana; identical to SEQ ID NO: 24398
  peptide (1)..(238): Ceres Seq. ID no. 13603210

SEQ ID NO: 110802 - protein, 199 aa, Arabidopsis thaliana; identical to SEQ ID NO: 24399
  peptide (1)..(199): Ceres Seq. ID no. 13603211

SEQ ID NO: 110803 - DNA, 1552 bp, Arabidopsis thaliana; identical to SEQ ID NO: 99564
  misc_feature (1)..(1552): Ceres Seq. ID no. 13603212
  misc_feature (1)..(1552): Ortholog of  Ceres SEQ ID NO 13597446 as cited in SEQ ID NO 64098
  misc_feature (1)..(1552): Ortholog of  Ceres SEQ ID NO 15226246 as cited in SEQ ID NO 68314

SEQ ID NO: 110804 - protein, 419 aa, Arabidopsis thaliana; identical to SEQ ID NO: 99565
  peptide (1)..(419): Ceres Seq. ID no. 13603213

SEQ ID NO: 110805 - protein, 415 aa, Arabidopsis thaliana; identical to SEQ ID NO: 99566
  peptide (1)..(415): Ceres Seq. ID no. 13603214

SEQ ID NO: 110806 - protein, 388 aa, Arabidopsis thaliana; identical to SEQ ID NO: 99567
  peptide (1)..(388): Ceres Seq. ID no. 13603215

SEQ ID NO: 110807 - DNA, 774 bp, Arabidopsis thaliana; identical to SEQ ID NO: 99568
  misc_feature (1)..(774): Ceres Seq. ID no. 13603220
  misc_feature (1)..(774): Ortholog of  Ceres SEQ ID NO 12635789 as cited in SEQ ID NO 0

SEQ ID NO: 110808 - protein, 202 aa, Arabidopsis thaliana; identical to SEQ ID NO: 99569
  peptide (1)..(202): Ceres Seq. ID no. 13603221

SEQ ID NO: 110809 - protein, 179 aa, Arabidopsis thaliana; identical to SEQ ID NO: 37920
  peptide (1)..(179): Ceres Seq. ID no. 13603222

SEQ ID NO: 110810 - protein, 134 aa, Arabidopsis thaliana; identical to SEQ ID NO: 37921
  peptide (1)..(134): Ceres Seq. ID no. 13603223

SEQ ID NO: 110811 - DNA, 1332 bp, Arabidopsis thaliana; identical to SEQ ID NO: 99572
  misc_feature (1)..(1332): Ceres Seq. ID no. 13603224
  misc_feature (1)..(1332): Ortholog of  Ceres SEQ ID NO 14312324 as cited in SEQ ID NO 60453
  misc_feature (1)..(1332): Ortholog of  Ceres SEQ ID NO 12624791 as cited in SEQ ID NO 63574
  misc_feature (1)..(1332): Ortholog of  Ceres SEQ ID NO 12780574 as cited in SEQ ID NO 65624

SEQ ID NO: 110812 - protein, 355 aa, Arabidopsis thaliana; identical to SEQ ID NO: 99573
  peptide (1)..(355): Ceres Seq. ID no. 13603225

SEQ ID NO: 110813 - protein, 330 aa, Arabidopsis thaliana; identical to SEQ ID NO: 99574
  peptide (1)..(330): Ceres Seq. ID no. 13603226

SEQ ID NO: 110814 - protein, 315 aa, Arabidopsis thaliana; identical to SEQ ID NO: 99575
  peptide (1)..(315): Ceres Seq. ID no. 13603227

SEQ ID NO: 110815 - DNA, 969 bp, Arabidopsis thaliana; identical to SEQ ID NO: 99576
  misc_feature (1)..(969): Ceres Seq. ID no. 13603249
  misc_feature (1)..(969): Ortholog of  Ceres SEQ ID NO 14305398 as cited in SEQ ID NO 60056

SEQ ID NO: 110816 - protein, 221 aa, Arabidopsis thaliana; identical to SEQ ID NO: 41469
  peptide (1)..(221): Ceres Seq. ID no. 13603250

SEQ ID NO: 110817 - protein, 148 aa, Arabidopsis thaliana; identical to SEQ ID NO: 41470
  peptide (1)..(148): Ceres Seq. ID no. 13603251

SEQ ID NO: 110818 - protein, 126 aa, Arabidopsis thaliana; identical to SEQ ID NO: 41471
  peptide (1)..(126): Ceres Seq. ID no. 13603252

SEQ ID NO: 110819 - DNA, 2726 bp, Arabidopsis thaliana; identical to SEQ ID NO: 99580
  misc_feature (1)..(2726): Ceres Seq. ID no. 13603255
  misc_feature (1)..(2726): Ortholog of  Ceres SEQ ID NO 13595870 as cited in SEQ ID NO 62101
  misc_feature (1)..(2726): Ortholog of  Ceres SEQ ID NO 13590241 as cited in SEQ ID NO 63878
  misc_feature (1)..(2726): Ortholog of  Ceres SEQ ID NO 12617475 as cited in SEQ ID NO 64550
  misc_feature (1)..(2726): Ortholog of  Ceres SEQ ID NO 13657939 as cited in SEQ ID NO 66349

SEQ ID NO: 110820 - protein, 815 aa, Arabidopsis thaliana; identical to SEQ ID NO: 21131
  peptide (1)..(815): Ceres Seq. ID no. 13603256

SEQ ID NO: 110821 - protein, 806 aa, Arabidopsis thaliana; identical to SEQ ID NO: 21132
  peptide (1)..(806): Ceres Seq. ID no. 13603257

SEQ ID NO: 110822 - protein, 663 aa, Arabidopsis thaliana; identical to SEQ ID NO: 21133
  peptide (1)..(663): Ceres Seq. ID no. 13603258

SEQ ID NO: 110823 - DNA, 1146 bp, Arabidopsis thaliana; identical to SEQ ID NO: 99584
  misc_feature (1)..(1146): Ceres Seq. ID no. 13603263
  misc_feature (1)..(1146): Ortholog of  Ceres SEQ ID NO 13658873 as cited in SEQ ID NO 66604
  misc_feature (1)..(1146): Ortholog of  Ceres SEQ ID NO 14309137 as cited in SEQ ID NO 0

SEQ ID NO: 110824 - protein, 272 aa, Arabidopsis thaliana; identical to SEQ ID NO: 99585
  peptide (1)..(272): Ceres Seq. ID no. 13603264

SEQ ID NO: 110825 - protein, 269 aa, Arabidopsis thaliana; identical to SEQ ID NO: 99586
  peptide (1)..(269): Ceres Seq. ID no. 13603265

SEQ ID NO: 110826 - protein, 145 aa, Arabidopsis thaliana; identical to SEQ ID NO: 99587
  peptide (1)..(145): Ceres Seq. ID no. 13603266

SEQ ID NO: 110827 - DNA, 1600 bp, Arabidopsis thaliana; identical to SEQ ID NO: 99588
  misc_feature (1)..(1600): Ceres Seq. ID no. 13603271
  misc_feature (1)..(1600): Ortholog of  Ceres SEQ ID NO 15170209 as cited in SEQ ID NO 58562
  misc_feature (1)..(1600): Ortholog of  Ceres SEQ ID NO 12616332 as cited in SEQ ID NO 63449
  misc_feature (1)..(1600): Ortholog of  Ceres SEQ ID NO 13597498 as cited in SEQ ID NO 64648

SEQ ID NO: 110828 - protein, 338 aa, Arabidopsis thaliana; identical to SEQ ID NO: 26027
  peptide (1)..(338): Ceres Seq. ID no. 13603272

SEQ ID NO: 110829 - protein, 317 aa, Arabidopsis thaliana; identical to SEQ ID NO: 26028
  peptide (1)..(317): Ceres Seq. ID no. 13603273

SEQ ID NO: 110830 - protein, 256 aa, Arabidopsis thaliana; identical to SEQ ID NO: 77663
  peptide (1)..(256): Ceres Seq. ID no. 13603274

SEQ ID NO: 110831 - DNA, 1663 bp, Arabidopsis thaliana; identical to SEQ ID NO: 99592
  misc_feature (1)..(1663): Ceres Seq. ID no. 13603279
  misc_feature (1)..(1663): Ortholog of  Ceres SEQ ID NO 14311313 as cited in SEQ ID NO 53503
  misc_feature (1)..(1663): Ortholog of  Ceres SEQ ID NO 14311625 as cited in SEQ ID NO 55184
  misc_feature (1)..(1663): Ortholog of  Ceres SEQ ID NO 14310588 as cited in SEQ ID NO 58770

SEQ ID NO: 110832 - protein, 486 aa, Arabidopsis thaliana; identical to SEQ ID NO: 99593
  peptide (1)..(486): Ceres Seq. ID no. 13603280

SEQ ID NO: 110833 - protein, 450 aa, Arabidopsis thaliana; identical to SEQ ID NO: 99594
  peptide (1)..(450): Ceres Seq. ID no. 13603281

SEQ ID NO: 110834 - protein, 419 aa, Arabidopsis thaliana; identical to SEQ ID NO: 72929
  peptide (1)..(419): Ceres Seq. ID no. 13603282

SEQ ID NO: 110835 - DNA, 1225 bp, Arabidopsis thaliana; identical to SEQ ID NO: 99596
  misc_feature (1)..(1225): Ceres Seq. ID no. 13603283
  misc_feature (1)..(1225): Ortholog of  Ceres SEQ ID NO 12635907 as cited in SEQ ID NO 525
  misc_feature (1)..(1225): Ortholog of  Ceres SEQ ID NO 13503463 as cited in SEQ ID NO 65057

SEQ ID NO: 110836 - protein, 304 aa, Arabidopsis thaliana; identical to SEQ ID NO: 99597
  peptide (1)..(304): Ceres Seq. ID no. 13603284

SEQ ID NO: 110837 - protein, 288 aa, Arabidopsis thaliana; identical to SEQ ID NO: 99598
  peptide (1)..(288): Ceres Seq. ID no. 13603285

SEQ ID NO: 110838 - DNA, 1743 bp, Arabidopsis thaliana; identical to SEQ ID NO: 99599
  misc_feature (1)..(1743): Ceres Seq. ID no. 13603290
  misc_feature (1)..(1743): Ortholog of  Ceres SEQ ID NO 14311957 as cited in SEQ ID NO 51628

SEQ ID NO: 110839 - protein, 396 aa, Arabidopsis thaliana; identical to SEQ ID NO: 40793
  peptide (1)..(396): Ceres Seq. ID no. 13603291

SEQ ID NO: 110840 - protein, 388 aa, Arabidopsis thaliana; identical to SEQ ID NO: 40794
  peptide (1)..(388): Ceres Seq. ID no. 13603292

SEQ ID NO: 110841 - protein, 384 aa, Arabidopsis thaliana; identical to SEQ ID NO: 40795
  peptide (1)..(384): Ceres Seq. ID no. 13603293

SEQ ID NO: 110842 - DNA, 1736 bp, Arabidopsis thaliana; identical to SEQ ID NO: 99603
  misc_feature (1)..(1736): Ceres Seq. ID no. 13603302
  misc_feature (1)..(1736): Ortholog of  Ceres SEQ ID NO 13658707 as cited in SEQ ID NO 66286
  misc_feature (1)..(1736): Ortholog of  Ceres SEQ ID NO 13654528 as cited in SEQ ID NO 68080

SEQ ID NO: 110843 - protein, 497 aa, Arabidopsis thaliana; identical to SEQ ID NO: 99604
  peptide (1)..(497): Ceres Seq. ID no. 13603303

SEQ ID NO: 110844 - protein, 449 aa, Arabidopsis thaliana; identical to SEQ ID NO: 39155
  peptide (1)..(449): Ceres Seq. ID no. 13603304

SEQ ID NO: 110845 - protein, 312 aa, Arabidopsis thaliana; identical to SEQ ID NO: 39156
  peptide (1)..(312): Ceres Seq. ID no. 13603305

SEQ ID NO: 110846 - DNA, 868 bp, Arabidopsis thaliana; identical to SEQ ID NO: 99607
  misc_feature (1)..(868): Ceres Seq. ID no. 13603306
  misc_feature (1)..(868): Ortholog of  Ceres SEQ ID NO 14305963 as cited in SEQ ID NO 52290
  misc_feature (1)..(868): Ortholog of  Ceres SEQ ID NO 14307492 as cited in SEQ ID NO 59504
  misc_feature (1)..(868): Ortholog of  Ceres SEQ ID NO 13597255 as cited in SEQ ID NO 63874

SEQ ID NO: 110847 - protein, 211 aa, Arabidopsis thaliana; identical to SEQ ID NO: 99608
  peptide (1)..(211): Ceres Seq. ID no. 13603307

SEQ ID NO: 110848 - protein, 168 aa, Arabidopsis thaliana; identical to SEQ ID NO: 99609
  peptide (1)..(168): Ceres Seq. ID no. 13603308

SEQ ID NO: 110849 - DNA, 1162 bp, Arabidopsis thaliana; identical to SEQ ID NO: 99610
  misc_feature (1)..(1162): Ceres Seq. ID no. 13603318
  misc_feature (1)..(1162): Ortholog of  Ceres SEQ ID NO 15180047 as cited in SEQ ID NO 0

SEQ ID NO: 110850 - protein, 316 aa, Arabidopsis thaliana; identical to SEQ ID NO: 29609
  peptide (1)..(316): Ceres Seq. ID no. 13603319

SEQ ID NO: 110851 - protein, 303 aa, Arabidopsis thaliana; identical to SEQ ID NO: 29610
  peptide (1)..(303): Ceres Seq. ID no. 13603320

SEQ ID NO: 110852 - protein, 229 aa, Arabidopsis thaliana; identical to SEQ ID NO: 29611
  peptide (1)..(229): Ceres Seq. ID no. 13603321

SEQ ID NO: 110853 - DNA, 1566 bp, Arabidopsis thaliana; identical to SEQ ID NO: 99614
  misc_feature (1)..(1566): Ceres Seq. ID no. 13603322
  misc_feature (1)..(1566): Ortholog of  Ceres SEQ ID NO 13647121 as cited in SEQ ID NO 151
  misc_feature (1)..(1566): Ortholog of  Ceres SEQ ID NO 15176411 as cited in SEQ ID NO 54468
  misc_feature (1)..(1566): Ortholog of  Ceres SEQ ID NO 14307131 as cited in SEQ ID NO 59707

SEQ ID NO: 110854 - protein, 465 aa, Arabidopsis thaliana; identical to SEQ ID NO: 99615
  peptide (1)..(465): Ceres Seq. ID no. 13603323

SEQ ID NO: 110855 - protein, 443 aa, Arabidopsis thaliana; identical to SEQ ID NO: 99616
  peptide (1)..(443): Ceres Seq. ID no. 13603324

SEQ ID NO: 110856 - protein, 381 aa, Arabidopsis thaliana; identical to SEQ ID NO: 99617
  peptide (1)..(381): Ceres Seq. ID no. 13603325

SEQ ID NO: 110857 - DNA, 2402 bp, Arabidopsis thaliana; identical to SEQ ID NO: 99618
  misc_feature (1)..(2402): Ceres Seq. ID no. 13603329
  misc_feature (1)..(2402): Ortholog of  Ceres SEQ ID NO 13657677 as cited in SEQ ID NO 66119

SEQ ID NO: 110858 - protein, 766 aa, Arabidopsis thaliana; identical to SEQ ID NO: 41448
  peptide (1)..(766): Ceres Seq. ID no. 13603330

SEQ ID NO: 110859 - protein, 763 aa, Arabidopsis thaliana; identical to SEQ ID NO: 41449
  peptide (1)..(763): Ceres Seq. ID no. 13603331

SEQ ID NO: 110860 - protein, 602 aa, Arabidopsis thaliana; identical to SEQ ID NO: 41450
  peptide (1)..(602): Ceres Seq. ID no. 13603332

SEQ ID NO: 110861 - DNA, 836 bp, Arabidopsis thaliana; identical to SEQ ID NO: 99622
  misc_feature (1)..(836): Ceres Seq. ID no. 13603344
  misc_feature (1)..(836): Ortholog of  Ceres SEQ ID NO 13595187 as cited in SEQ ID NO 56052
  misc_feature (1)..(836): Ortholog of  Ceres SEQ ID NO 14312239 as cited in SEQ ID NO 59176
  misc_feature (1)..(836): Ortholog of  Ceres SEQ ID NO 14313718 as cited in SEQ ID NO 59559
  misc_feature (1)..(836): Ortholog of  Ceres SEQ ID NO 15169505 as cited in SEQ ID NO 61011
  misc_feature (1)..(836): Ortholog of  Ceres SEQ ID NO 13662053 as cited in SEQ ID NO 61547
  misc_feature (1)..(836): Ortholog of  Ceres SEQ ID NO 13624283 as cited in SEQ ID NO 0

SEQ ID NO: 110862 - protein, 195 aa, Arabidopsis thaliana; identical to SEQ ID NO: 22865
  peptide (1)..(195): Ceres Seq. ID no. 13603345

SEQ ID NO: 110863 - protein, 188 aa, Arabidopsis thaliana; identical to SEQ ID NO: 22866
  peptide (1)..(188): Ceres Seq. ID no. 13603346

SEQ ID NO: 110864 - protein, 183 aa, Arabidopsis thaliana; identical to SEQ ID NO: 22867
  peptide (1)..(183): Ceres Seq. ID no. 13603347

SEQ ID NO: 110865 - DNA, 1110 bp, Arabidopsis thaliana; identical to SEQ ID NO: 99626
  misc_feature (1)..(1110): Ceres Seq. ID no. 13603350
  misc_feature (1)..(1110): Ortholog of  Ceres SEQ ID NO 13599278 as cited in SEQ ID NO 0

SEQ ID NO: 110866 - protein, 309 aa, Arabidopsis thaliana; identical to SEQ ID NO: 99627
  peptide (1)..(309): Ceres Seq. ID no. 13603351

SEQ ID NO: 110867 - protein, 284 aa, Arabidopsis thaliana; identical to SEQ ID NO: 99628
  peptide (1)..(284): Ceres Seq. ID no. 13603352

SEQ ID NO: 110868 - DNA, 945 bp, Arabidopsis thaliana; identical to SEQ ID NO: 99629
  misc_feature (1)..(945): Ceres Seq. ID no. 13603353
  misc_feature (1)..(945): Ortholog of  Ceres SEQ ID NO 14302035 as cited in SEQ ID NO 51855
  misc_feature (1)..(945): Ortholog of  Ceres SEQ ID NO 14301432 as cited in SEQ ID NO 56425

SEQ ID NO: 110869 - protein, 168 aa, Arabidopsis thaliana; identical to SEQ ID NO: 34779
  peptide (1)..(168): Ceres Seq. ID no. 13603354

SEQ ID NO: 110870 - protein, 98 aa, Arabidopsis thaliana; identical to SEQ ID NO: 34780
  peptide (1)..(98): Ceres Seq. ID no. 13603355

SEQ ID NO: 110871 - protein, 97 aa, Arabidopsis thaliana; identical to SEQ ID NO: 34781
  peptide (1)..(97): Ceres Seq. ID no. 13603356

SEQ ID NO: 110872 - DNA, 3149 bp, Arabidopsis thaliana; identical to SEQ ID NO: 99633
  misc_feature (1)..(3149): Ceres Seq. ID no. 13603357
  misc_feature (1)..(3149): Ortholog of  Ceres SEQ ID NO 12584310 as cited in SEQ ID NO 67945

SEQ ID NO: 110873 - protein, 867 aa, Arabidopsis thaliana; identical to SEQ ID NO: 99634
  peptide (1)..(867): Ceres Seq. ID no. 15218796

SEQ ID NO: 110874 - protein, 813 aa, Arabidopsis thaliana; identical to SEQ ID NO: 99635
  peptide (1)..(813): Ceres Seq. ID no. 15218797

SEQ ID NO: 110875 - protein, 803 aa, Arabidopsis thaliana; identical to SEQ ID NO: 99636
  peptide (1)..(803): Ceres Seq. ID no. 15218798

SEQ ID NO: 110876 - DNA, 3148 bp, Arabidopsis thaliana; identical to SEQ ID NO: 99637
  misc_feature (1)..(3148): Ceres Seq. ID no. 13603358
  misc_feature (1)..(3148): Ortholog of  Ceres SEQ ID NO 12584310 as cited in SEQ ID NO 67945

SEQ ID NO: 110877 - protein, 867 aa, Arabidopsis thaliana; identical to SEQ ID NO: 99638
  peptide (1)..(867): Ceres Seq. ID no. 13603359

SEQ ID NO: 110878 - protein, 813 aa, Arabidopsis thaliana; identical to SEQ ID NO: 99639
  peptide (1)..(813): Ceres Seq. ID no. 13603360

SEQ ID NO: 110879 - protein, 803 aa, Arabidopsis thaliana; identical to SEQ ID NO: 99640
  peptide (1)..(803): Ceres Seq. ID no. 13603361

SEQ ID NO: 110880 - DNA, 928 bp, Arabidopsis thaliana; identical to SEQ ID NO: 99641
  misc_feature (1)..(928): Ceres Seq. ID no. 13603362
  misc_feature (1)..(928): Ortholog of  Ceres SEQ ID NO 14314461 as cited in SEQ ID NO 52355
  misc_feature (1)..(928): Ortholog of  Ceres SEQ ID NO 14306812 as cited in SEQ ID NO 56361
  misc_feature (1)..(928): Ortholog of  Ceres SEQ ID NO 15168461 as cited in SEQ ID NO 57068

SEQ ID NO: 110881 - protein, 239 aa, Arabidopsis thaliana; identical to SEQ ID NO: 28662
  peptide (1)..(239): Ceres Seq. ID no. 13603363

SEQ ID NO: 110882 - DNA, 1307 bp, Arabidopsis thaliana; identical to SEQ ID NO: 99643
  misc_feature (1)..(1307): Ceres Seq. ID no. 13603364
  misc_feature (1)..(1307): Ortholog of  Ceres SEQ ID NO 13638540 as cited in SEQ ID NO 51531
  misc_feature (1)..(1307): Ortholog of  Ceres SEQ ID NO 13595337 as cited in SEQ ID NO 56160
  misc_feature (1)..(1307): Ortholog of  Ceres SEQ ID NO 12615230 as cited in SEQ ID NO 62513

SEQ ID NO: 110883 - protein, 340 aa, Arabidopsis thaliana; identical to SEQ ID NO: 35984
  peptide (1)..(340): Ceres Seq. ID no. 13603365

SEQ ID NO: 110884 - protein, 314 aa, Arabidopsis thaliana; identical to SEQ ID NO: 35985
  peptide (1)..(314): Ceres Seq. ID no. 13603366

SEQ ID NO: 110885 - protein, 313 aa, Arabidopsis thaliana; identical to SEQ ID NO: 35986
  peptide (1)..(313): Ceres Seq. ID no. 13603367

SEQ ID NO: 110886 - DNA, 1788 bp, Arabidopsis thaliana; identical to SEQ ID NO: 99647
  misc_feature (1)..(1788): Ceres Seq. ID no. 13603371
  misc_feature (1)..(1788): Ortholog of  Ceres SEQ ID NO 13596816 as cited in SEQ ID NO 62287

SEQ ID NO: 110887 - protein, 496 aa, Arabidopsis thaliana; identical to SEQ ID NO: 99648
  peptide (1)..(496): Ceres Seq. ID no. 13603372

SEQ ID NO: 110888 - protein, 476 aa, Arabidopsis thaliana; identical to SEQ ID NO: 99649
  peptide (1)..(476): Ceres Seq. ID no. 13603373

SEQ ID NO: 110889 - protein, 388 aa, Arabidopsis thaliana; identical to SEQ ID NO: 99650
  peptide (1)..(388): Ceres Seq. ID no. 13603374

SEQ ID NO: 110890 - DNA, 651 bp, Arabidopsis thaliana; identical to SEQ ID NO: 99651
  misc_feature (1)..(651): Ceres Seq. ID no. 13603375
  misc_feature (1)..(651): Ortholog of  Ceres SEQ ID NO 12556948 as cited in SEQ ID NO 54

SEQ ID NO: 110891 - protein, 118 aa, Arabidopsis thaliana; identical to SEQ ID NO: 99652
  peptide (1)..(118): Ceres Seq. ID no. 13603376

SEQ ID NO: 110892 - protein, 82 aa, Arabidopsis thaliana; identical to SEQ ID NO: 99653
  peptide (1)..(82): Ceres Seq. ID no. 13603377

SEQ ID NO: 110893 - protein, 67 aa, Arabidopsis thaliana; identical to SEQ ID NO: 28721
  peptide (1)..(67): Ceres Seq. ID no. 13603378

SEQ ID NO: 110894 - DNA, 710 bp, Arabidopsis thaliana; identical to SEQ ID NO: 99655
  misc_feature (1)..(710): Ceres Seq. ID no. 13603379
  misc_feature (1)..(710): Ortholog of  Ceres SEQ ID NO 13594809 as cited in SEQ ID NO 51847
  misc_feature (1)..(710): Ortholog of  Ceres SEQ ID NO 12617639 as cited in SEQ ID NO 65219
  misc_feature (1)..(710): Ortholog of  Ceres SEQ ID NO 14309033 as cited in SEQ ID NO 0
  misc_feature (1)..(710): Ortholog of  Ceres SEQ ID NO 15173998 as cited in SEQ ID NO 0
  misc_feature (1)..(710): Ortholog of  Ceres SEQ ID NO 15178333 as cited in SEQ ID NO 0

SEQ ID NO: 110895 - protein, 168 aa, Arabidopsis thaliana; identical to SEQ ID NO: 30689
  peptide (1)..(168): Ceres Seq. ID no. 13603380

SEQ ID NO: 110896 - protein, 136 aa, Arabidopsis thaliana; identical to SEQ ID NO: 25481
  peptide (1)..(136): Ceres Seq. ID no. 13603381

SEQ ID NO: 110897 - protein, 111 aa, Arabidopsis thaliana; identical to SEQ ID NO: 25482
  peptide (1)..(111): Ceres Seq. ID no. 13603382

SEQ ID NO: 110898 - DNA, 1445 bp, Arabidopsis thaliana; identical to SEQ ID NO: 99659
  misc_feature (1)..(1445): Ceres Seq. ID no. 13603383
  misc_feature (1)..(1445): Ortholog of  Ceres SEQ ID NO 15176440 as cited in SEQ ID NO 53697
  misc_feature (1)..(1445): Ortholog of  Ceres SEQ ID NO 14314717 as cited in SEQ ID NO 54224
  misc_feature (1)..(1445): Ortholog of  Ceres SEQ ID NO 14313429 as cited in SEQ ID NO 55662

SEQ ID NO: 110899 - protein, 437 aa, Arabidopsis thaliana; identical to SEQ ID NO: 99660
  peptide (1)..(437): Ceres Seq. ID no. 13603384

SEQ ID NO: 110900 - protein, 420 aa, Arabidopsis thaliana; identical to SEQ ID NO: 99661
  peptide (1)..(420): Ceres Seq. ID no. 13603385

SEQ ID NO: 110901 - protein, 380 aa, Arabidopsis thaliana; identical to SEQ ID NO: 99662
  peptide (1)..(380): Ceres Seq. ID no. 13603386

SEQ ID NO: 110902 - DNA, 1256 bp, Arabidopsis thaliana; identical to SEQ ID NO: 99663
  misc_feature (1)..(1256): Ceres Seq. ID no. 13603387
  misc_feature (1)..(1256): Ortholog of  Ceres SEQ ID NO 13595492 as cited in SEQ ID NO 51124

SEQ ID NO: 110903 - protein, 372 aa, Arabidopsis thaliana; identical to SEQ ID NO: 43442
  peptide (1)..(372): Ceres Seq. ID no. 13603388

SEQ ID NO: 110904 - protein, 364 aa, Arabidopsis thaliana; identical to SEQ ID NO: 43443
  peptide (1)..(364): Ceres Seq. ID no. 13603389

SEQ ID NO: 110905 - protein, 357 aa, Arabidopsis thaliana; identical to SEQ ID NO: 43444
  peptide (1)..(357): Ceres Seq. ID no. 13603390

SEQ ID NO: 110906 - DNA, 868 bp, Arabidopsis thaliana; identical to SEQ ID NO: 99667
  misc_feature (1)..(868): Ceres Seq. ID no. 13603391
  misc_feature (1)..(868): Ortholog of  Ceres SEQ ID NO 15172911 as cited in SEQ ID NO 55340
  misc_feature (1)..(868): Ortholog of  Ceres SEQ ID NO 13655345 as cited in SEQ ID NO 63222

SEQ ID NO: 110907 - protein, 245 aa, Arabidopsis thaliana; identical to SEQ ID NO: 99668
  peptide (1)..(245): Ceres Seq. ID no. 13603392

SEQ ID NO: 110908 - protein, 234 aa, Arabidopsis thaliana; identical to SEQ ID NO: 99669
  peptide (1)..(234): Ceres Seq. ID no. 13603393

SEQ ID NO: 110909 - protein, 145 aa, Arabidopsis thaliana; identical to SEQ ID NO: 99670
  peptide (1)..(145): Ceres Seq. ID no. 13603394

SEQ ID NO: 110910 - DNA, 886 bp, Arabidopsis thaliana; identical to SEQ ID NO: 99671
  misc_feature (1)..(886): Ceres Seq. ID no. 13603402
  misc_feature (1)..(886): Ortholog of  Ceres SEQ ID NO 15178880 as cited in SEQ ID NO 0

SEQ ID NO: 110911 - protein, 251 aa, Arabidopsis thaliana; identical to SEQ ID NO: 22972
  peptide (1)..(251): Ceres Seq. ID no. 13603403

SEQ ID NO: 110912 - protein, 223 aa, Arabidopsis thaliana; identical to SEQ ID NO: 22973
  peptide (1)..(223): Ceres Seq. ID no. 13603404

SEQ ID NO: 110913 - protein, 167 aa, Arabidopsis thaliana; identical to SEQ ID NO: 22974
  peptide (1)..(167): Ceres Seq. ID no. 13603405

SEQ ID NO: 110914 - DNA, 1487 bp, Arabidopsis thaliana; identical to SEQ ID NO: 99675
  misc_feature (1)..(1487): Ceres Seq. ID no. 13603431
  misc_feature (1)..(1487): Ortholog of  Ceres SEQ ID NO 12609146 as cited in SEQ ID NO 52118
  misc_feature (1)..(1487): Ortholog of  Ceres SEQ ID NO 14303397 as cited in SEQ ID NO 54614
  misc_feature (1)..(1487): Ortholog of  Ceres SEQ ID NO 13594056 as cited in SEQ ID NO 55691
  misc_feature (1)..(1487): Ortholog of  Ceres SEQ ID NO 14314186 as cited in SEQ ID NO 57457
  misc_feature (1)..(1487): Ortholog of  Ceres SEQ ID NO 13638136 as cited in SEQ ID NO 58644
  misc_feature (1)..(1487): Ortholog of  Ceres SEQ ID NO 13596868 as cited in SEQ ID NO 62806
  misc_feature (1)..(1487): Ortholog of  Ceres SEQ ID NO 13595885 as cited in SEQ ID NO 69265
  misc_feature (1)..(1487): Ortholog of  Ceres SEQ ID NO 12566239 as cited in SEQ ID NO 0
  misc_feature (1)..(1487): Ortholog of  Ceres SEQ ID NO 13599119 as cited in SEQ ID NO 0
  misc_feature (1)..(1487): Ortholog of  Ceres SEQ ID NO 14308987 as cited in SEQ ID NO 0

SEQ ID NO: 110915 - protein, 289 aa, Arabidopsis thaliana; identical to SEQ ID NO: 40326
  peptide (1)..(289): Ceres Seq. ID no. 13603432

SEQ ID NO: 110916 - protein, 280 aa, Arabidopsis thaliana; identical to SEQ ID NO: 40327
  peptide (1)..(280): Ceres Seq. ID no. 13603433

SEQ ID NO: 110917 - protein, 254 aa, Arabidopsis thaliana; identical to SEQ ID NO: 40328
  peptide (1)..(254): Ceres Seq. ID no. 13603434

SEQ ID NO: 110918 - DNA, 1263 bp, Arabidopsis thaliana; identical to SEQ ID NO: 99679
  misc_feature (1)..(1263): Ceres Seq. ID no. 13603447
  misc_feature (1)..(1263): Ortholog of  Ceres SEQ ID NO 15176333 as cited in SEQ ID NO 52787
  misc_feature (1)..(1263): Ortholog of  Ceres SEQ ID NO 14312047 as cited in SEQ ID NO 55656
  misc_feature (1)..(1263): Ortholog of  Ceres SEQ ID NO 12611392 as cited in SEQ ID NO 56826
  misc_feature (1)..(1263): Ortholog of  Ceres SEQ ID NO 13660872 as cited in SEQ ID NO 60830
  misc_feature (1)..(1263): Ortholog of  Ceres SEQ ID NO 12616221 as cited in SEQ ID NO 63291
  misc_feature (1)..(1263): Ortholog of  Ceres SEQ ID NO 14302355 as cited in SEQ ID NO 65830

SEQ ID NO: 110919 - protein, 317 aa, Arabidopsis thaliana; identical to SEQ ID NO: 99680
  peptide (1)..(317): Ceres Seq. ID no. 13603448

SEQ ID NO: 110920 - protein, 290 aa, Arabidopsis thaliana; identical to SEQ ID NO: 99681
  peptide (1)..(290): Ceres Seq. ID no. 13603449

SEQ ID NO: 110921 - protein, 184 aa, Arabidopsis thaliana; identical to SEQ ID NO: 39803
  peptide (1)..(184): Ceres Seq. ID no. 13603450

SEQ ID NO: 110922 - DNA, 939 bp, Arabidopsis thaliana; identical to SEQ ID NO: 99683
  misc_feature (1)..(939): Ceres Seq. ID no. 13603451
  misc_feature (1)..(939): Ortholog of  Ceres SEQ ID NO 13596958 as cited in SEQ ID NO 63319
  misc_feature (1)..(939): Ortholog of  Ceres SEQ ID NO 12614814 as cited in SEQ ID NO 68816

SEQ ID NO: 110923 - protein, 197 aa, Arabidopsis thaliana; identical to SEQ ID NO: 38104
  peptide (1)..(197): Ceres Seq. ID no. 13603452

SEQ ID NO: 110924 - protein, 172 aa, Arabidopsis thaliana; identical to SEQ ID NO: 38105
  peptide (1)..(172): Ceres Seq. ID no. 13603453

SEQ ID NO: 110925 - protein, 171 aa, Arabidopsis thaliana; identical to SEQ ID NO: 38106
  peptide (1)..(171): Ceres Seq. ID no. 13603454

SEQ ID NO: 110926 - DNA, 2143 bp, Arabidopsis thaliana; identical to SEQ ID NO: 99687
  misc_feature (1)..(2143): Ceres Seq. ID no. 13603455
  misc_feature (1)..(2143): Ortholog of  Ceres SEQ ID NO 14313943 as cited in SEQ ID NO 54725

SEQ ID NO: 110927 - protein, 610 aa, Arabidopsis thaliana; identical to SEQ ID NO: 26610
  peptide (1)..(610): Ceres Seq. ID no. 13603456

SEQ ID NO: 110928 - protein, 420 aa, Arabidopsis thaliana; identical to SEQ ID NO: 26611
  peptide (1)..(420): Ceres Seq. ID no. 13603457

SEQ ID NO: 110929 - protein, 343 aa, Arabidopsis thaliana; identical to SEQ ID NO: 26612
  peptide (1)..(343): Ceres Seq. ID no. 13603458

SEQ ID NO: 110930 - DNA, 1540 bp, Arabidopsis thaliana; identical to SEQ ID NO: 99691
  misc_feature (1)..(1540): Ceres Seq. ID no. 13603459
  misc_feature (1)..(1540): Ortholog of  Ceres SEQ ID NO 14301420 as cited in SEQ ID NO 56580

SEQ ID NO: 110931 - protein, 341 aa, Arabidopsis thaliana; identical to SEQ ID NO: 38690
  peptide (1)..(341): Ceres Seq. ID no. 13603460

SEQ ID NO: 110932 - protein, 298 aa, Arabidopsis thaliana; identical to SEQ ID NO: 38691
  peptide (1)..(298): Ceres Seq. ID no. 13603461

SEQ ID NO: 110933 - DNA, 912 bp, Arabidopsis thaliana; identical to SEQ ID NO: 99694
  misc_feature (1)..(912): Ceres Seq. ID no. 13603462
  misc_feature (1)..(912): Ortholog of  Ceres SEQ ID NO 12467471 as cited in SEQ ID NO 55509
  misc_feature (1)..(912): Ortholog of  Ceres SEQ ID NO 13598557 as cited in SEQ ID NO 65168

SEQ ID NO: 110934 - protein, 164 aa, Arabidopsis thaliana; identical to SEQ ID NO: 99695
  peptide (1)..(164): Ceres Seq. ID no. 13603463

SEQ ID NO: 110935 - protein, 116 aa, Arabidopsis thaliana; identical to SEQ ID NO: 99696
  peptide (1)..(116): Ceres Seq. ID no. 13603464

SEQ ID NO: 110936 - DNA, 1089 bp, Arabidopsis thaliana; identical to SEQ ID NO: 99697
  misc_feature (1)..(1089): Ceres Seq. ID no. 13603471
  misc_feature (1)..(1089): Ortholog of  Ceres SEQ ID NO 13594490 as cited in SEQ ID NO 51289
  misc_feature (1)..(1089): Ortholog of  Ceres SEQ ID NO 14309434 as cited in SEQ ID NO 0

SEQ ID NO: 110937 - protein, 240 aa, Arabidopsis thaliana; identical to SEQ ID NO: 21830
  peptide (1)..(240): Ceres Seq. ID no. 13603472

SEQ ID NO: 110938 - protein, 195 aa, Arabidopsis thaliana; identical to SEQ ID NO: 21831
  peptide (1)..(195): Ceres Seq. ID no. 13603473

SEQ ID NO: 110939 - protein, 154 aa, Arabidopsis thaliana; identical to SEQ ID NO: 21832
  peptide (1)..(154): Ceres Seq. ID no. 13603474

SEQ ID NO: 110940 - DNA, 944 bp, Arabidopsis thaliana; identical to SEQ ID NO: 99701
  misc_feature (1)..(944): Ceres Seq. ID no. 13603475
  misc_feature (1)..(944): Ortholog of  Ceres SEQ ID NO 13660094 as cited in SEQ ID NO 60820

SEQ ID NO: 110941 - protein, 212 aa, Arabidopsis thaliana; identical to SEQ ID NO: 41666
  peptide (1)..(212): Ceres Seq. ID no. 13603476

SEQ ID NO: 110942 - protein, 187 aa, Arabidopsis thaliana; identical to SEQ ID NO: 41667
  peptide (1)..(187): Ceres Seq. ID no. 13603477

SEQ ID NO: 110943 - DNA, 747 bp, Arabidopsis thaliana; identical to SEQ ID NO: 99704
  misc_feature (1)..(747): Ceres Seq. ID no. 13603487
  misc_feature (1)..(747): Ortholog of  Ceres SEQ ID NO 13583412 as cited in SEQ ID NO 62624

SEQ ID NO: 110944 - protein, 183 aa, Arabidopsis thaliana; identical to SEQ ID NO: 29707
  peptide (1)..(183): Ceres Seq. ID no. 13603488

SEQ ID NO: 110945 - protein, 182 aa, Arabidopsis thaliana; identical to SEQ ID NO: 29708
  peptide (1)..(182): Ceres Seq. ID no. 13603489

SEQ ID NO: 110946 - protein, 109 aa, Arabidopsis thaliana; identical to SEQ ID NO: 29709
  peptide (1)..(109): Ceres Seq. ID no. 13603490

SEQ ID NO: 110947 - DNA, 1138 bp, Arabidopsis thaliana; identical to SEQ ID NO: 99708
  misc_feature (1)..(1138): Ceres Seq. ID no. 13603491
  misc_feature (1)..(1138): Ortholog of  Ceres SEQ ID NO 13595423 as cited in SEQ ID NO 56775

SEQ ID NO: 110948 - protein, 334 aa, Arabidopsis thaliana; identical to SEQ ID NO: 99709
  peptide (1)..(334): Ceres Seq. ID no. 13603492

SEQ ID NO: 110949 - protein, 314 aa, Arabidopsis thaliana; identical to SEQ ID NO: 99710
  peptide (1)..(314): Ceres Seq. ID no. 13603493

SEQ ID NO: 110950 - protein, 238 aa, Arabidopsis thaliana; identical to SEQ ID NO: 99711
  peptide (1)..(238): Ceres Seq. ID no. 13603494

SEQ ID NO: 110951 - DNA, 3237 bp, Arabidopsis thaliana; identical to SEQ ID NO: 99712
  misc_feature (1)..(3237): Ceres Seq. ID no. 13603499
  misc_feature (1)..(3237): Ortholog of  Ceres SEQ ID NO 14308747 as cited in SEQ ID NO 55372

SEQ ID NO: 110952 - protein, 1032 aa, Arabidopsis thaliana; identical to SEQ ID NO: 24425
  peptide (1)..(1032): Ceres Seq. ID no. 13603500

SEQ ID NO: 110953 - protein, 974 aa, Arabidopsis thaliana; identical to SEQ ID NO: 24426
  peptide (1)..(974): Ceres Seq. ID no. 13603501

SEQ ID NO: 110954 - protein, 886 aa, Arabidopsis thaliana; identical to SEQ ID NO: 97065
  peptide (1)..(886): Ceres Seq. ID no. 13603502

SEQ ID NO: 110955 - DNA, 1519 bp, Arabidopsis thaliana; identical to SEQ ID NO: 99716
  misc_feature (1)..(1519): Ceres Seq. ID no. 13603503
  misc_feature (1)..(1519): Ortholog of  Ceres SEQ ID NO 13639663 as cited in SEQ ID NO 57850

SEQ ID NO: 110956 - protein, 442 aa, Arabidopsis thaliana; identical to SEQ ID NO: 99717
  peptide (1)..(442): Ceres Seq. ID no. 13603504

SEQ ID NO: 110957 - protein, 391 aa, Arabidopsis thaliana; identical to SEQ ID NO: 99718
  peptide (1)..(391): Ceres Seq. ID no. 13603505

SEQ ID NO: 110958 - protein, 380 aa, Arabidopsis thaliana; identical to SEQ ID NO: 99719
  peptide (1)..(380): Ceres Seq. ID no. 13603506

SEQ ID NO: 110959 - DNA, 1140 bp, Arabidopsis thaliana; identical to SEQ ID NO: 99720
  misc_feature (1)..(1140): Ceres Seq. ID no. 13603511
  misc_feature (1)..(1140): Ortholog of  Ceres SEQ ID NO 14314050 as cited in SEQ ID NO 59952
  misc_feature (1)..(1140): Ortholog of  Ceres SEQ ID NO 13596474 as cited in SEQ ID NO 62169
  misc_feature (1)..(1140): Ortholog of  Ceres SEQ ID NO 13598714 as cited in SEQ ID NO 62656
  misc_feature (1)..(1140): Ortholog of  Ceres SEQ ID NO 13596969 as cited in SEQ ID NO 63375
  misc_feature (1)..(1140): Ortholog of  Ceres SEQ ID NO 13597519 as cited in SEQ ID NO 64759
  misc_feature (1)..(1140): Ortholog of  Ceres SEQ ID NO 14302388 as cited in SEQ ID NO 65655
  misc_feature (1)..(1140): Ortholog of  Ceres SEQ ID NO 13595926 as cited in SEQ ID NO 67778
  misc_feature (1)..(1140): Ortholog of  Ceres SEQ ID NO 13587054 as cited in SEQ ID NO 0

SEQ ID NO: 110960 - protein, 329 aa, Arabidopsis thaliana; identical to SEQ ID NO: 99721
  peptide (1)..(329): Ceres Seq. ID no. 13603512

SEQ ID NO: 110961 - protein, 287 aa, Arabidopsis thaliana; identical to SEQ ID NO: 99722
  peptide (1)..(287): Ceres Seq. ID no. 13603513

SEQ ID NO: 110962 - protein, 283 aa, Arabidopsis thaliana; identical to SEQ ID NO: 99723
  peptide (1)..(283): Ceres Seq. ID no. 13603514

SEQ ID NO: 110963 - DNA, 1643 bp, Arabidopsis thaliana; identical to SEQ ID NO: 99724
  misc_feature (1)..(1643): Ceres Seq. ID no. 13603515
  misc_feature (1)..(1643): Ortholog of  Ceres SEQ ID NO 14308723 as cited in SEQ ID NO 58758

SEQ ID NO: 110964 - protein, 493 aa, Arabidopsis thaliana; identical to SEQ ID NO: 99725
  peptide (1)..(493): Ceres Seq. ID no. 13603516

SEQ ID NO: 110965 - protein, 476 aa, Arabidopsis thaliana; identical to SEQ ID NO: 99726
  peptide (1)..(476): Ceres Seq. ID no. 13603517

SEQ ID NO: 110966 - protein, 433 aa, Arabidopsis thaliana; identical to SEQ ID NO: 99727
  peptide (1)..(433): Ceres Seq. ID no. 13603518

SEQ ID NO: 110967 - DNA, 1215 bp, Arabidopsis thaliana; identical to SEQ ID NO: 99728
  misc_feature (1)..(1215): Ceres Seq. ID no. 13603523
  misc_feature (1)..(1215): Ortholog of  Ceres SEQ ID NO 14313014 as cited in SEQ ID NO 54841
  misc_feature (1)..(1215): Ortholog of  Ceres SEQ ID NO 14316091 as cited in SEQ ID NO 57622
  misc_feature (1)..(1215): Ortholog of  Ceres SEQ ID NO 13639317 as cited in SEQ ID NO 59781
  misc_feature (1)..(1215): Ortholog of  Ceres SEQ ID NO 13654578 as cited in SEQ ID NO 68583

SEQ ID NO: 110968 - protein, 337 aa, Arabidopsis thaliana; identical to SEQ ID NO: 99729
  peptide (1)..(337): Ceres Seq. ID no. 13603524

SEQ ID NO: 110969 - protein, 299 aa, Arabidopsis thaliana; identical to SEQ ID NO: 99730
  peptide (1)..(299): Ceres Seq. ID no. 13603525

SEQ ID NO: 110970 - protein, 185 aa, Arabidopsis thaliana; identical to SEQ ID NO: 99731
  peptide (1)..(185): Ceres Seq. ID no. 13603526

SEQ ID NO: 110971 - DNA, 1413 bp, Arabidopsis thaliana; identical to SEQ ID NO: 99732
  misc_feature (1)..(1413): Ceres Seq. ID no. 13603527
  misc_feature (1)..(1413): Ortholog of  Ceres SEQ ID NO 15177654 as cited in SEQ ID NO 59933
  misc_feature (1)..(1413): Ortholog of  Ceres SEQ ID NO 14303600 as cited in SEQ ID NO 64632
  misc_feature (1)..(1413): Ortholog of  Ceres SEQ ID NO 14302776 as cited in SEQ ID NO 66919

SEQ ID NO: 110972 - protein, 313 aa, Arabidopsis thaliana; identical to SEQ ID NO: 34731
  peptide (1)..(313): Ceres Seq. ID no. 13603528

SEQ ID NO: 110973 - protein, 284 aa, Arabidopsis thaliana; identical to SEQ ID NO: 34732
  peptide (1)..(284): Ceres Seq. ID no. 13603529

SEQ ID NO: 110974 - protein, 237 aa, Arabidopsis thaliana; identical to SEQ ID NO: 34733
  peptide (1)..(237): Ceres Seq. ID no. 13603530

SEQ ID NO: 110975 - DNA, 934 bp, Arabidopsis thaliana; identical to SEQ ID NO: 99736
  misc_feature (1)..(934): Ceres Seq. ID no. 13603531
  misc_feature (1)..(934): Ortholog of  Ceres SEQ ID NO 13586122 as cited in SEQ ID NO 0

SEQ ID NO: 110976 - protein, 244 aa, Arabidopsis thaliana; identical to SEQ ID NO: 41005
  peptide (1)..(244): Ceres Seq. ID no. 13603532

SEQ ID NO: 110977 - protein, 195 aa, Arabidopsis thaliana; identical to SEQ ID NO: 41006
  peptide (1)..(195): Ceres Seq. ID no. 13603533

SEQ ID NO: 110978 - protein, 183 aa, Arabidopsis thaliana; identical to SEQ ID NO: 41007
  peptide (1)..(183): Ceres Seq. ID no. 13603534

SEQ ID NO: 110979 - DNA, 1537 bp, Arabidopsis thaliana; identical to SEQ ID NO: 99740
  misc_feature (1)..(1537): Ceres Seq. ID no. 13603535
  misc_feature (1)..(1537): Ortholog of  Ceres SEQ ID NO 13582281 as cited in SEQ ID NO 51014
  misc_feature (1)..(1537): Ortholog of  Ceres SEQ ID NO 14315606 as cited in SEQ ID NO 53515
  misc_feature (1)..(1537): Ortholog of  Ceres SEQ ID NO 12617417 as cited in SEQ ID NO 65089

SEQ ID NO: 110980 - protein, 475 aa, Arabidopsis thaliana; identical to SEQ ID NO: 99741
  peptide (1)..(475): Ceres Seq. ID no. 13603536

SEQ ID NO: 110981 - protein, 470 aa, Arabidopsis thaliana; identical to SEQ ID NO: 99742
  peptide (1)..(470): Ceres Seq. ID no. 13603537

SEQ ID NO: 110982 - protein, 453 aa, Arabidopsis thaliana; identical to SEQ ID NO: 99743
  peptide (1)..(453): Ceres Seq. ID no. 13603538

SEQ ID NO: 110983 - DNA, 1402 bp, Arabidopsis thaliana; identical to SEQ ID NO: 99744
  misc_feature (1)..(1402): Ceres Seq. ID no. 13603539
  misc_feature (1)..(1402): Ortholog of  Ceres SEQ ID NO 14304969 as cited in SEQ ID NO 53193
  misc_feature (1)..(1402): Ortholog of  Ceres SEQ ID NO 14314851 as cited in SEQ ID NO 54014
  misc_feature (1)..(1402): Ortholog of  Ceres SEQ ID NO 15227214 as cited in SEQ ID NO 55368
  misc_feature (1)..(1402): Ortholog of  Ceres SEQ ID NO 13638897 as cited in SEQ ID NO 55839
  misc_feature (1)..(1402): Ortholog of  Ceres SEQ ID NO 15173484 as cited in SEQ ID NO 61804
  misc_feature (1)..(1402): Ortholog of  Ceres SEQ ID NO 13596958 as cited in SEQ ID NO 63319
  misc_feature (1)..(1402): Ortholog of  Ceres SEQ ID NO 12614573 as cited in SEQ ID NO 68344
  misc_feature (1)..(1402): Ortholog of  Ceres SEQ ID NO 12614814 as cited in SEQ ID NO 68816
  misc_feature (1)..(1402): Ortholog of  Ceres SEQ ID NO 13624040 as cited in SEQ ID NO 0

SEQ ID NO: 110984 - protein, 321 aa, Arabidopsis thaliana; identical to SEQ ID NO: 23887
  peptide (1)..(321): Ceres Seq. ID no. 13603540

SEQ ID NO: 110985 - protein, 190 aa, Arabidopsis thaliana; identical to SEQ ID NO: 23888
  peptide (1)..(190): Ceres Seq. ID no. 13603541

SEQ ID NO: 110986 - protein, 189 aa, Arabidopsis thaliana; identical to SEQ ID NO: 23889
  peptide (1)..(189): Ceres Seq. ID no. 13603542

SEQ ID NO: 110987 - DNA, 1361 bp, Arabidopsis thaliana; identical to SEQ ID NO: 99748
  misc_feature (1)..(1361): Ceres Seq. ID no. 13603543
  misc_feature (1)..(1361): Ortholog of  Ceres SEQ ID NO 14307404 as cited in SEQ ID NO 54231
  misc_feature (1)..(1361): Ortholog of  Ceres SEQ ID NO 14315052 as cited in SEQ ID NO 56951

SEQ ID NO: 110988 - protein, 381 aa, Arabidopsis thaliana; identical to SEQ ID NO: 99749
  peptide (1)..(381): Ceres Seq. ID no. 13603544

SEQ ID NO: 110989 - protein, 351 aa, Arabidopsis thaliana; identical to SEQ ID NO: 99750
  peptide (1)..(351): Ceres Seq. ID no. 13603545

SEQ ID NO: 110990 - protein, 262 aa, Arabidopsis thaliana; identical to SEQ ID NO: 99751
  peptide (1)..(262): Ceres Seq. ID no. 13603546

SEQ ID NO: 110991 - DNA, 1352 bp, Arabidopsis thaliana; identical to SEQ ID NO: 99752
  misc_feature (1)..(1352): Ceres Seq. ID no. 13603555
  misc_feature (1)..(1352): Ortholog of  Ceres SEQ ID NO 14312163 as cited in SEQ ID NO 57211

SEQ ID NO: 110992 - protein, 347 aa, Arabidopsis thaliana; identical to SEQ ID NO: 34907
  peptide (1)..(347): Ceres Seq. ID no. 13603556

SEQ ID NO: 110993 - protein, 316 aa, Arabidopsis thaliana; identical to SEQ ID NO: 34908
  peptide (1)..(316): Ceres Seq. ID no. 13603557

SEQ ID NO: 110994 - protein, 242 aa, Arabidopsis thaliana; identical to SEQ ID NO: 34909
  peptide (1)..(242): Ceres Seq. ID no. 13603558

SEQ ID NO: 110995 - DNA, 1302 bp, Arabidopsis thaliana; identical to SEQ ID NO: 99756
  misc_feature (1)..(1302): Ceres Seq. ID no. 13603565
  misc_feature (1)..(1302): Ortholog of  Ceres SEQ ID NO 15171268 as cited in SEQ ID NO 51297
  misc_feature (1)..(1302): Ortholog of  Ceres SEQ ID NO 15170521 as cited in SEQ ID NO 55668
  misc_feature (1)..(1302): Ortholog of  Ceres SEQ ID NO 13598249 as cited in SEQ ID NO 62509
  misc_feature (1)..(1302): Ortholog of  Ceres SEQ ID NO 13598595 as cited in SEQ ID NO 64671
  misc_feature (1)..(1302): Ortholog of  Ceres SEQ ID NO 13654241 as cited in SEQ ID NO 68348

SEQ ID NO: 110996 - protein, 283 aa, Arabidopsis thaliana; identical to SEQ ID NO: 25592
  peptide (1)..(283): Ceres Seq. ID no. 13603566

SEQ ID NO: 110997 - protein, 273 aa, Arabidopsis thaliana; identical to SEQ ID NO: 25593
  peptide (1)..(273): Ceres Seq. ID no. 13603567

SEQ ID NO: 110998 - DNA, 1153 bp, Arabidopsis thaliana; identical to SEQ ID NO: 99759
  misc_feature (1)..(1153): Ceres Seq. ID no. 13603568
  misc_feature (1)..(1153): Ortholog of  Ceres SEQ ID NO 14304408 as cited in SEQ ID NO 58051
  misc_feature (1)..(1153): Ortholog of  Ceres SEQ ID NO 14314759 as cited in SEQ ID NO 59915
  misc_feature (1)..(1153): Ortholog of  Ceres SEQ ID NO 13661769 as cited in SEQ ID NO 61435
  misc_feature (1)..(1153): Ortholog of  Ceres SEQ ID NO 13600585 as cited in SEQ ID NO 0

SEQ ID NO: 110999 - protein, 306 aa, Arabidopsis thaliana; identical to SEQ ID NO: 99760
  peptide (1)..(306): Ceres Seq. ID no. 13603569

SEQ ID NO: 111000 - protein, 295 aa, Arabidopsis thaliana; identical to SEQ ID NO: 21687
  peptide (1)..(295): Ceres Seq. ID no. 13603570

SEQ ID NO: 111001 - protein, 191 aa, Arabidopsis thaliana; identical to SEQ ID NO: 21688
  peptide (1)..(191): Ceres Seq. ID no. 13603571

SEQ ID NO: 111002 - DNA, 1298 bp, Arabidopsis thaliana; identical to SEQ ID NO: 99763
  misc_feature (1)..(1298): Ceres Seq. ID no. 13603572
  misc_feature (1)..(1298): Ortholog of  Ceres SEQ ID NO 14310880 as cited in SEQ ID NO 55342
  misc_feature (1)..(1298): Ortholog of  Ceres SEQ ID NO 14313451 as cited in SEQ ID NO 62474

SEQ ID NO: 111003 - protein, 355 aa, Arabidopsis thaliana; identical to SEQ ID NO: 99764
  peptide (1)..(355): Ceres Seq. ID no. 13603573

SEQ ID NO: 111004 - protein, 342 aa, Arabidopsis thaliana; identical to SEQ ID NO: 38243
  peptide (1)..(342): Ceres Seq. ID no. 13603574

SEQ ID NO: 111005 - DNA, 648 bp, Arabidopsis thaliana; identical to SEQ ID NO: 99766
  misc_feature (1)..(648): Ceres Seq. ID no. 13603575
  misc_feature (1)..(648): Ortholog of  Ceres SEQ ID NO 13600689 as cited in SEQ ID NO 0
  misc_feature (1)..(648): Ortholog of  Ceres SEQ ID NO 15178120 as cited in SEQ ID NO 0

SEQ ID NO: 111006 - protein, 122 aa, Arabidopsis thaliana; identical to SEQ ID NO: 99767
  peptide (1)..(122): Ceres Seq. ID no. 13603576

SEQ ID NO: 111007 - protein, 114 aa, Arabidopsis thaliana; identical to SEQ ID NO: 99768
  peptide (1)..(114): Ceres Seq. ID no. 13603577

SEQ ID NO: 111008 - DNA, 1003 bp, Arabidopsis thaliana; identical to SEQ ID NO: 99769
  misc_feature (1)..(1003): Ceres Seq. ID no. 13603578
  misc_feature (1)..(1003): Ortholog of  Ceres SEQ ID NO 14314823 as cited in SEQ ID NO 52565
  misc_feature (1)..(1003): Ortholog of  Ceres SEQ ID NO 14307324 as cited in SEQ ID NO 54131
  misc_feature (1)..(1003): Ortholog of  Ceres SEQ ID NO 14303336 as cited in SEQ ID NO 54567
  misc_feature (1)..(1003): Ortholog of  Ceres SEQ ID NO 13594940 as cited in SEQ ID NO 55819
  misc_feature (1)..(1003): Ortholog of  Ceres SEQ ID NO 13599083 as cited in SEQ ID NO 0

SEQ ID NO: 111009 - protein, 274 aa, Arabidopsis thaliana; identical to SEQ ID NO: 39370
  peptide (1)..(274): Ceres Seq. ID no. 13603579

SEQ ID NO: 111010 - protein, 229 aa, Arabidopsis thaliana; identical to SEQ ID NO: 39371
  peptide (1)..(229): Ceres Seq. ID no. 13603580

SEQ ID NO: 111011 - protein, 227 aa, Arabidopsis thaliana; identical to SEQ ID NO: 39372
  peptide (1)..(227): Ceres Seq. ID no. 13603581

SEQ ID NO: 111012 - DNA, 1608 bp, Arabidopsis thaliana; identical to SEQ ID NO: 99773
  misc_feature (1)..(1608): Ceres Seq. ID no. 13603586
  misc_feature (1)..(1608): Ortholog of  Ceres SEQ ID NO 14316184 as cited in SEQ ID NO 54517
  misc_feature (1)..(1608): Ortholog of  Ceres SEQ ID NO 15226529 as cited in SEQ ID NO 55005
  misc_feature (1)..(1608): Ortholog of  Ceres SEQ ID NO 12616225 as cited in SEQ ID NO 68930

SEQ ID NO: 111013 - protein, 425 aa, Arabidopsis thaliana; identical to SEQ ID NO: 99774
  peptide (1)..(425): Ceres Seq. ID no. 13603587

SEQ ID NO: 111014 - protein, 401 aa, Arabidopsis thaliana; identical to SEQ ID NO: 99775
  peptide (1)..(401): Ceres Seq. ID no. 13603588

SEQ ID NO: 111015 - protein, 390 aa, Arabidopsis thaliana; identical to SEQ ID NO: 99776
  peptide (1)..(390): Ceres Seq. ID no. 13603589

SEQ ID NO: 111016 - DNA, 1741 bp, Arabidopsis thaliana; identical to SEQ ID NO: 99777
  misc_feature (1)..(1741): Ceres Seq. ID no. 13603590
  misc_feature (1)..(1741): Ortholog of  Ceres SEQ ID NO 15172472 as cited in SEQ ID NO 55361

SEQ ID NO: 111017 - protein, 579 aa, Arabidopsis thaliana; identical to SEQ ID NO: 99778
  peptide (1)..(579): Ceres Seq. ID no. 13603591

SEQ ID NO: 111018 - protein, 520 aa, Arabidopsis thaliana; identical to SEQ ID NO: 99779
  peptide (1)..(520): Ceres Seq. ID no. 13603592

SEQ ID NO: 111019 - protein, 465 aa, Arabidopsis thaliana; identical to SEQ ID NO: 99780
  peptide (1)..(465): Ceres Seq. ID no. 13603593

SEQ ID NO: 111020 - DNA, 1479 bp, Arabidopsis thaliana; identical to SEQ ID NO: 99781
  misc_feature (1)..(1479): Ceres Seq. ID no. 13603594
  misc_feature (1)..(1479): Ortholog of  Ceres SEQ ID NO 14311721 as cited in SEQ ID NO 51363

SEQ ID NO: 111021 - protein, 365 aa, Arabidopsis thaliana; identical to SEQ ID NO: 99782
  peptide (1)..(365): Ceres Seq. ID no. 13603595

SEQ ID NO: 111022 - protein, 354 aa, Arabidopsis thaliana; identical to SEQ ID NO: 99783
  peptide (1)..(354): Ceres Seq. ID no. 13603596

SEQ ID NO: 111023 - protein, 317 aa, Arabidopsis thaliana; identical to SEQ ID NO: 99784
  peptide (1)..(317): Ceres Seq. ID no. 13603597

SEQ ID NO: 111024 - DNA, 1291 bp, Arabidopsis thaliana; identical to SEQ ID NO: 99785
  misc_feature (1)..(1291): Ceres Seq. ID no. 13603604
  misc_feature (1)..(1291): Ortholog of  Ceres SEQ ID NO 13581804 as cited in SEQ ID NO 51424
  misc_feature (1)..(1291): Ortholog of  Ceres SEQ ID NO 13663874 as cited in SEQ ID NO 67003

SEQ ID NO: 111025 - protein, 214 aa, Arabidopsis thaliana; identical to SEQ ID NO: 27115
  peptide (1)..(214): Ceres Seq. ID no. 13603605

SEQ ID NO: 111026 - protein, 207 aa, Arabidopsis thaliana; identical to SEQ ID NO: 27116
  peptide (1)..(207): Ceres Seq. ID no. 13603606

SEQ ID NO: 111027 - protein, 153 aa, Arabidopsis thaliana; identical to SEQ ID NO: 27117
  peptide (1)..(153): Ceres Seq. ID no. 13603607

SEQ ID NO: 111028 - DNA, 1428 bp, Arabidopsis thaliana; identical to SEQ ID NO: 99789
  misc_feature (1)..(1428): Ceres Seq. ID no. 13603608
  misc_feature (1)..(1428): Ortholog of  Ceres SEQ ID NO 13586135 as cited in SEQ ID NO 1210
  misc_feature (1)..(1428): Ortholog of  Ceres SEQ ID NO 13654329 as cited in SEQ ID NO 68717

SEQ ID NO: 111029 - protein, 359 aa, Arabidopsis thaliana; identical to SEQ ID NO: 34764
  peptide (1)..(359): Ceres Seq. ID no. 13603609

SEQ ID NO: 111030 - protein, 210 aa, Arabidopsis thaliana; identical to SEQ ID NO: 34765
  peptide (1)..(210): Ceres Seq. ID no. 13603610

SEQ ID NO: 111031 - DNA, 2535 bp, Arabidopsis thaliana; identical to SEQ ID NO: 99792
  misc_feature (1)..(2535): Ceres Seq. ID no. 13603635
  misc_feature (1)..(2535): Ortholog of  Ceres SEQ ID NO 12609037 as cited in SEQ ID NO 51306
  misc_feature (1)..(2535): Ortholog of  Ceres SEQ ID NO 12610391 as cited in SEQ ID NO 55942
  misc_feature (1)..(2535): Ortholog of  Ceres SEQ ID NO 14309068 as cited in SEQ ID NO 0

SEQ ID NO: 111032 - protein, 731 aa, Arabidopsis thaliana; identical to SEQ ID NO: 99793
  peptide (1)..(731): Ceres Seq. ID no. 13603636

SEQ ID NO: 111033 - protein, 630 aa, Arabidopsis thaliana; identical to SEQ ID NO: 99794
  peptide (1)..(630): Ceres Seq. ID no. 13603637

SEQ ID NO: 111034 - protein, 598 aa, Arabidopsis thaliana; identical to SEQ ID NO: 99795
  peptide (1)..(598): Ceres Seq. ID no. 13603638

SEQ ID NO: 111035 - DNA, 1511 bp, Arabidopsis thaliana; identical to SEQ ID NO: 99796
  misc_feature (1)..(1511): Ceres Seq. ID no. 13603647
  misc_feature (1)..(1511): Ortholog of  Ceres SEQ ID NO 13593889 as cited in SEQ ID NO 53305
  misc_feature (1)..(1511): Ortholog of  Ceres SEQ ID NO 13581959 as cited in SEQ ID NO 56156

SEQ ID NO: 111036 - protein, 385 aa, Arabidopsis thaliana; identical to SEQ ID NO: 99797
  peptide (1)..(385): Ceres Seq. ID no. 13603648

SEQ ID NO: 111037 - protein, 232 aa, Arabidopsis thaliana; identical to SEQ ID NO: 42195
  peptide (1)..(232): Ceres Seq. ID no. 13603649

SEQ ID NO: 111038 - protein, 216 aa, Arabidopsis thaliana; identical to SEQ ID NO: 42196
  peptide (1)..(216): Ceres Seq. ID no. 13603650

SEQ ID NO: 111039 - DNA, 877 bp, Arabidopsis thaliana; identical to SEQ ID NO: 99800
  misc_feature (1)..(877): Ceres Seq. ID no. 13603655
  misc_feature (1)..(877): Ortholog of  Ceres SEQ ID NO 13661890 as cited in SEQ ID NO 61482

SEQ ID NO: 111040 - protein, 237 aa, Arabidopsis thaliana; identical to SEQ ID NO: 99801
  peptide (1)..(237): Ceres Seq. ID no. 13603656

SEQ ID NO: 111041 - protein, 210 aa, Arabidopsis thaliana; identical to SEQ ID NO: 77734
  peptide (1)..(210): Ceres Seq. ID no. 13603657

SEQ ID NO: 111042 - DNA, 1275 bp, Arabidopsis thaliana; identical to SEQ ID NO: 99803
  misc_feature (1)..(1275): Ceres Seq. ID no. 13603682
  misc_feature (1)..(1275): Ortholog of  Ceres SEQ ID NO 15177270 as cited in SEQ ID NO 51703

SEQ ID NO: 111043 - protein, 354 aa, Arabidopsis thaliana; identical to SEQ ID NO: 22407
  peptide (1)..(354): Ceres Seq. ID no. 13603683

SEQ ID NO: 111044 - protein, 336 aa, Arabidopsis thaliana; identical to SEQ ID NO: 22408
  peptide (1)..(336): Ceres Seq. ID no. 13603684

SEQ ID NO: 111045 - protein, 230 aa, Arabidopsis thaliana; identical to SEQ ID NO: 22409
  peptide (1)..(230): Ceres Seq. ID no. 13603685

SEQ ID NO: 111046 - DNA, 1247 bp, Arabidopsis thaliana; identical to SEQ ID NO: 99807
  misc_feature (1)..(1247): Ceres Seq. ID no. 13603686
  misc_feature (1)..(1247): Ortholog of  Ceres SEQ ID NO 13598528 as cited in SEQ ID NO 64938

SEQ ID NO: 111047 - protein, 320 aa, Arabidopsis thaliana; identical to SEQ ID NO: 36234
  peptide (1)..(320): Ceres Seq. ID no. 13603687

SEQ ID NO: 111048 - protein, 218 aa, Arabidopsis thaliana; identical to SEQ ID NO: 36235
  peptide (1)..(218): Ceres Seq. ID no. 13603688

SEQ ID NO: 111049 - DNA, 983 bp, Arabidopsis thaliana; identical to SEQ ID NO: 99810
  misc_feature (1)..(983): Ceres Seq. ID no. 13603693
  misc_feature (1)..(983): Ortholog of  Ceres SEQ ID NO 14304983 as cited in SEQ ID NO 53862
  misc_feature (1)..(983): Ortholog of  Ceres SEQ ID NO 14310483 as cited in SEQ ID NO 58376
  misc_feature (1)..(983): Ortholog of  Ceres SEQ ID NO 13597528 as cited in SEQ ID NO 64802
  misc_feature (1)..(983): Ortholog of  Ceres SEQ ID NO 13654451 as cited in SEQ ID NO 67881

SEQ ID NO: 111050 - protein, 287 aa, Arabidopsis thaliana; identical to SEQ ID NO: 99811
  peptide (1)..(287): Ceres Seq. ID no. 13603694

SEQ ID NO: 111051 - protein, 283 aa, Arabidopsis thaliana; identical to SEQ ID NO: 99812
  peptide (1)..(283): Ceres Seq. ID no. 13603695

SEQ ID NO: 111052 - protein, 249 aa, Arabidopsis thaliana; identical to SEQ ID NO: 99813
  peptide (1)..(249): Ceres Seq. ID no. 13603696

SEQ ID NO: 111053 - DNA, 987 bp, Arabidopsis thaliana; identical to SEQ ID NO: 99814
  misc_feature (1)..(987): Ceres Seq. ID no. 13603713
  misc_feature (1)..(987): Ortholog of  Ceres SEQ ID NO 13598455 as cited in SEQ ID NO 62908

SEQ ID NO: 111054 - protein, 269 aa, Arabidopsis thaliana; identical to SEQ ID NO: 36927
  peptide (1)..(269): Ceres Seq. ID no. 13603714

SEQ ID NO: 111055 - protein, 192 aa, Arabidopsis thaliana; identical to SEQ ID NO: 36928
  peptide (1)..(192): Ceres Seq. ID no. 13603715

SEQ ID NO: 111056 - protein, 184 aa, Arabidopsis thaliana; identical to SEQ ID NO: 36929
  peptide (1)..(184): Ceres Seq. ID no. 13603716

SEQ ID NO: 111057 - DNA, 836 bp, Arabidopsis thaliana; identical to SEQ ID NO: 99818
  misc_feature (1)..(836): Ceres Seq. ID no. 13603724
  misc_feature (1)..(836): Ortholog of  Ceres SEQ ID NO 15178836 as cited in SEQ ID NO 1142

SEQ ID NO: 111058 - protein, 220 aa, Arabidopsis thaliana; identical to SEQ ID NO: 28149
  peptide (1)..(220): Ceres Seq. ID no. 13603725

SEQ ID NO: 111059 - DNA, 1469 bp, Arabidopsis thaliana; identical to SEQ ID NO: 99820
  misc_feature (1)..(1469): Ceres Seq. ID no. 13603740
  misc_feature (1)..(1469): Ortholog of  Ceres SEQ ID NO 15177742 as cited in SEQ ID NO 1202
  misc_feature (1)..(1469): Ortholog of  Ceres SEQ ID NO 15226750 as cited in SEQ ID NO 58711

SEQ ID NO: 111060 - protein, 419 aa, Arabidopsis thaliana; identical to SEQ ID NO: 99821
  peptide (1)..(419): Ceres Seq. ID no. 13603741

SEQ ID NO: 111061 - protein, 377 aa, Arabidopsis thaliana; identical to SEQ ID NO: 23828
  peptide (1)..(377): Ceres Seq. ID no. 13603742

SEQ ID NO: 111062 - protein, 313 aa, Arabidopsis thaliana; identical to SEQ ID NO: 23829
  peptide (1)..(313): Ceres Seq. ID no. 13603743

SEQ ID NO: 111063 - DNA, 2139 bp, Arabidopsis thaliana; identical to SEQ ID NO: 99824
  misc_feature (1)..(2139): Ceres Seq. ID no. 13603744
  misc_feature (1)..(2139): Ortholog of  Ceres SEQ ID NO 12611963 as cited in SEQ ID NO 53414

SEQ ID NO: 111064 - protein, 536 aa, Arabidopsis thaliana; identical to SEQ ID NO: 99825
  peptide (1)..(536): Ceres Seq. ID no. 13603745

SEQ ID NO: 111065 - protein, 527 aa, Arabidopsis thaliana; identical to SEQ ID NO: 99826
  peptide (1)..(527): Ceres Seq. ID no. 13603746

SEQ ID NO: 111066 - protein, 514 aa, Arabidopsis thaliana; identical to SEQ ID NO: 99827
  peptide (1)..(514): Ceres Seq. ID no. 13603747

SEQ ID NO: 111067 - DNA, 1442 bp, Arabidopsis thaliana; identical to SEQ ID NO: 99828
  misc_feature (1)..(1442): Ceres Seq. ID no. 13603748
  misc_feature (1)..(1442): Ortholog of  Ceres SEQ ID NO 14311553 as cited in SEQ ID NO 51462
  misc_feature (1)..(1442): Ortholog of  Ceres SEQ ID NO 13599003 as cited in SEQ ID NO 0

SEQ ID NO: 111068 - protein, 413 aa, Arabidopsis thaliana; identical to SEQ ID NO: 29233
  peptide (1)..(413): Ceres Seq. ID no. 13603749

SEQ ID NO: 111069 - protein, 401 aa, Arabidopsis thaliana; identical to SEQ ID NO: 29234
  peptide (1)..(401): Ceres Seq. ID no. 13603750

SEQ ID NO: 111070 - protein, 370 aa, Arabidopsis thaliana; identical to SEQ ID NO: 29235
  peptide (1)..(370): Ceres Seq. ID no. 13603751

SEQ ID NO: 111071 - DNA, 1325 bp, Arabidopsis thaliana; identical to SEQ ID NO: 99832
  misc_feature (1)..(1325): Ceres Seq. ID no. 13603755
  misc_feature (1)..(1325): Ortholog of  Ceres SEQ ID NO 15168355 as cited in SEQ ID NO 57246

SEQ ID NO: 111072 - protein, 369 aa, Arabidopsis thaliana; identical to SEQ ID NO: 99833
  peptide (1)..(369): Ceres Seq. ID no. 13603756

SEQ ID NO: 111073 - protein, 361 aa, Arabidopsis thaliana; identical to SEQ ID NO: 99834
  peptide (1)..(361): Ceres Seq. ID no. 13603757

SEQ ID NO: 111074 - protein, 355 aa, Arabidopsis thaliana; identical to SEQ ID NO: 99835
  peptide (1)..(355): Ceres Seq. ID no. 13603758

SEQ ID NO: 111075 - DNA, 1911 bp, Arabidopsis thaliana; identical to SEQ ID NO: 99836
  misc_feature (1)..(1911): Ceres Seq. ID no. 13603759
  misc_feature (1)..(1911): Ortholog of  Ceres SEQ ID NO 12587870 as cited in SEQ ID NO 63523

SEQ ID NO: 111076 - protein, 589 aa, Arabidopsis thaliana; identical to SEQ ID NO: 99837
  peptide (1)..(589): Ceres Seq. ID no. 13603760

SEQ ID NO: 111077 - protein, 550 aa, Arabidopsis thaliana; identical to SEQ ID NO: 99838
  peptide (1)..(550): Ceres Seq. ID no. 13603761

SEQ ID NO: 111078 - DNA, 1312 bp, Arabidopsis thaliana; identical to SEQ ID NO: 99839
  misc_feature (1)..(1312): Ceres Seq. ID no. 13603766
  misc_feature (1)..(1312): Ortholog of  Ceres SEQ ID NO 12609394 as cited in SEQ ID NO 52095

SEQ ID NO: 111079 - protein, 325 aa, Arabidopsis thaliana; identical to SEQ ID NO: 35205
  peptide (1)..(325): Ceres Seq. ID no. 13603767

SEQ ID NO: 111080 - protein, 256 aa, Arabidopsis thaliana; identical to SEQ ID NO: 35206
  peptide (1)..(256): Ceres Seq. ID no. 13603768

SEQ ID NO: 111081 - DNA, 2218 bp, Arabidopsis thaliana; identical to SEQ ID NO: 99842
  misc_feature (1)..(2218): Ceres Seq. ID no. 13603773
  misc_feature (1)..(2218): Ortholog of  Ceres SEQ ID NO 13659971 as cited in SEQ ID NO 67565
  misc_feature (1)..(2218): Ortholog of  Ceres SEQ ID NO 13500385 as cited in SEQ ID NO 67583

SEQ ID NO: 111082 - protein, 594 aa, Arabidopsis thaliana; identical to SEQ ID NO: 99843
  peptide (1)..(594): Ceres Seq. ID no. 13603774

SEQ ID NO: 111083 - protein, 504 aa, Arabidopsis thaliana; identical to SEQ ID NO: 99844
  peptide (1)..(504): Ceres Seq. ID no. 13603775

SEQ ID NO: 111084 - protein, 428 aa, Arabidopsis thaliana; identical to SEQ ID NO: 99845
  peptide (1)..(428): Ceres Seq. ID no. 13603776

SEQ ID NO: 111085 - DNA, 1326 bp, Arabidopsis thaliana; identical to SEQ ID NO: 99846
  misc_feature (1)..(1326): Ceres Seq. ID no. 13603780
  misc_feature (1)..(1326): Ortholog of  Ceres SEQ ID NO 15170037 as cited in SEQ ID NO 55447
  misc_feature (1)..(1326): Ortholog of  Ceres SEQ ID NO 13582350 as cited in SEQ ID NO 56734
  misc_feature (1)..(1326): Ortholog of  Ceres SEQ ID NO 12578315 as cited in SEQ ID NO 62451
  misc_feature (1)..(1326): Ortholog of  Ceres SEQ ID NO 12615907 as cited in SEQ ID NO 62860
  misc_feature (1)..(1326): Ortholog of  Ceres SEQ ID NO 13597295 as cited in SEQ ID NO 63743
  misc_feature (1)..(1326): Ortholog of  Ceres SEQ ID NO 12617090 as cited in SEQ ID NO 64005
  misc_feature (1)..(1326): Ortholog of  Ceres SEQ ID NO 13597233 as cited in SEQ ID NO 64370
  misc_feature (1)..(1326): Ortholog of  Ceres SEQ ID NO 13600370 as cited in SEQ ID NO 0

SEQ ID NO: 111086 - protein, 341 aa, Arabidopsis thaliana; identical to SEQ ID NO: 42614
  peptide (1)..(341): Ceres Seq. ID no. 13603781

SEQ ID NO: 111087 - protein, 262 aa, Arabidopsis thaliana; identical to SEQ ID NO: 42615
  peptide (1)..(262): Ceres Seq. ID no. 13603782

SEQ ID NO: 111088 - protein, 252 aa, Arabidopsis thaliana; identical to SEQ ID NO: 42616
  peptide (1)..(252): Ceres Seq. ID no. 13603783

SEQ ID NO: 111089 - DNA, 1522 bp, Arabidopsis thaliana; identical to SEQ ID NO: 99850
  misc_feature (1)..(1522): Ceres Seq. ID no. 13603787
  misc_feature (1)..(1522): Ortholog of  Ceres SEQ ID NO 15177750 as cited in SEQ ID NO 57772
  misc_feature (1)..(1522): Ortholog of  Ceres SEQ ID NO 13596581 as cited in SEQ ID NO 62420
  misc_feature (1)..(1522): Ortholog of  Ceres SEQ ID NO 13591273 as cited in SEQ ID NO 65904
  misc_feature (1)..(1522): Ortholog of  Ceres SEQ ID NO 13623086 as cited in SEQ ID NO 0

SEQ ID NO: 111090 - protein, 381 aa, Arabidopsis thaliana; identical to SEQ ID NO: 43109
  peptide (1)..(381): Ceres Seq. ID no. 13603788

SEQ ID NO: 111091 - protein, 352 aa, Arabidopsis thaliana; identical to SEQ ID NO: 36865
  peptide (1)..(352): Ceres Seq. ID no. 13603789

SEQ ID NO: 111092 - protein, 267 aa, Arabidopsis thaliana; identical to SEQ ID NO: 36866
  peptide (1)..(267): Ceres Seq. ID no. 13603790

SEQ ID NO: 111093 - DNA, 1035 bp, Arabidopsis thaliana; identical to SEQ ID NO: 99854
  misc_feature (1)..(1035): Ceres Seq. ID no. 13603791
  misc_feature (1)..(1035): Ortholog of  Ceres SEQ ID NO 13637842 as cited in SEQ ID NO 54650
  misc_feature (1)..(1035): Ortholog of  Ceres SEQ ID NO 12608127 as cited in SEQ ID NO 57579
  misc_feature (1)..(1035): Ortholog of  Ceres SEQ ID NO 12634558 as cited in SEQ ID NO 0

SEQ ID NO: 111094 - protein, 265 aa, Arabidopsis thaliana; identical to SEQ ID NO: 99855
  peptide (1)..(265): Ceres Seq. ID no. 13603792

SEQ ID NO: 111095 - DNA, 965 bp, Arabidopsis thaliana; identical to SEQ ID NO: 99856
  misc_feature (1)..(965): Ceres Seq. ID no. 13603793
  misc_feature (1)..(965): Ortholog of  Ceres SEQ ID NO 13637842 as cited in SEQ ID NO 54650
  misc_feature (1)..(965): Ortholog of  Ceres SEQ ID NO 12608127 as cited in SEQ ID NO 57579
  misc_feature (1)..(965): Ortholog of  Ceres SEQ ID NO 12634558 as cited in SEQ ID NO 0

SEQ ID NO: 111096 - protein, 270 aa, Arabidopsis thaliana; identical to SEQ ID NO: 86362
  peptide (1)..(270): Ceres Seq. ID no. 13603794

SEQ ID NO: 111097 - DNA, 1633 bp, Arabidopsis thaliana; identical to SEQ ID NO: 99858
  misc_feature (1)..(1633): Ceres Seq. ID no. 13603802
  misc_feature (1)..(1633): Ortholog of  Ceres SEQ ID NO 13663419 as cited in SEQ ID NO 66561

SEQ ID NO: 111098 - protein, 458 aa, Arabidopsis thaliana; identical to SEQ ID NO: 99859
  peptide (1)..(458): Ceres Seq. ID no. 13603803

SEQ ID NO: 111099 - protein, 433 aa, Arabidopsis thaliana; identical to SEQ ID NO: 99860
  peptide (1)..(433): Ceres Seq. ID no. 13603804

SEQ ID NO: 111100 - protein, 319 aa, Arabidopsis thaliana; identical to SEQ ID NO: 99861
  peptide (1)..(319): Ceres Seq. ID no. 13603805

SEQ ID NO: 111101 - DNA, 1505 bp, Arabidopsis thaliana; identical to SEQ ID NO: 99862
  misc_feature (1)..(1505): Ceres Seq. ID no. 13603806
  misc_feature (1)..(1505): Ortholog of  Ceres SEQ ID NO 13663419 as cited in SEQ ID NO 66561

SEQ ID NO: 111102 - protein, 437 aa, Arabidopsis thaliana; identical to SEQ ID NO: 99863
  peptide (1)..(437): Ceres Seq. ID no. 13603807

SEQ ID NO: 111103 - protein, 321 aa, Arabidopsis thaliana; identical to SEQ ID NO: 22296
  peptide (1)..(321): Ceres Seq. ID no. 13603808

SEQ ID NO: 111104 - protein, 259 aa, Arabidopsis thaliana; identical to SEQ ID NO: 22297
  peptide (1)..(259): Ceres Seq. ID no. 13603809

SEQ ID NO: 111105 - DNA, 1134 bp, Arabidopsis thaliana; identical to SEQ ID NO: 99866
  misc_feature (1)..(1134): Ceres Seq. ID no. 13603810
  misc_feature (1)..(1134): Ortholog of  Ceres SEQ ID NO 15171289 as cited in SEQ ID NO 51570

SEQ ID NO: 111106 - protein, 309 aa, Arabidopsis thaliana; identical to SEQ ID NO: 99867
  peptide (1)..(309): Ceres Seq. ID no. 13603811

SEQ ID NO: 111107 - protein, 301 aa, Arabidopsis thaliana; identical to SEQ ID NO: 99868
  peptide (1)..(301): Ceres Seq. ID no. 13603812

SEQ ID NO: 111108 - DNA, 939 bp, Arabidopsis thaliana; identical to SEQ ID NO: 99869
  misc_feature (1)..(939): Ceres Seq. ID no. 13603821
  misc_feature (1)..(939): Ortholog of  Ceres SEQ ID NO 13638849 as cited in SEQ ID NO 52046
  misc_feature (1)..(939): Ortholog of  Ceres SEQ ID NO 13599613 as cited in SEQ ID NO 0

SEQ ID NO: 111109 - protein, 269 aa, Arabidopsis thaliana; identical to SEQ ID NO: 36075
  peptide (1)..(269): Ceres Seq. ID no. 13603822

SEQ ID NO: 111110 - protein, 263 aa, Arabidopsis thaliana; identical to SEQ ID NO: 36076
  peptide (1)..(263): Ceres Seq. ID no. 13603823

SEQ ID NO: 111111 - protein, 197 aa, Arabidopsis thaliana; identical to SEQ ID NO: 36077
  peptide (1)..(197): Ceres Seq. ID no. 13603824

SEQ ID NO: 111112 - DNA, 1208 bp, Arabidopsis thaliana; identical to SEQ ID NO: 99873
  misc_feature (1)..(1208): Ceres Seq. ID no. 13603825
  misc_feature (1)..(1208): Ortholog of  Ceres SEQ ID NO 14313548 as cited in SEQ ID NO 68496

SEQ ID NO: 111113 - protein, 311 aa, Arabidopsis thaliana; identical to SEQ ID NO: 99874
  peptide (1)..(311): Ceres Seq. ID no. 13603826

SEQ ID NO: 111114 - protein, 180 aa, Arabidopsis thaliana; identical to SEQ ID NO: 99875
  peptide (1)..(180): Ceres Seq. ID no. 13603827

SEQ ID NO: 111115 - protein, 179 aa, Arabidopsis thaliana; identical to SEQ ID NO: 99876
  peptide (1)..(179): Ceres Seq. ID no. 13603828

SEQ ID NO: 111116 - DNA, 690 bp, Arabidopsis thaliana; identical to SEQ ID NO: 99877
  misc_feature (1)..(690): Ceres Seq. ID no. 13603829
  misc_feature (1)..(690): Ortholog of  Ceres SEQ ID NO 12609863 as cited in SEQ ID NO 52056
  misc_feature (1)..(690): Ortholog of  Ceres SEQ ID NO 13661859 as cited in SEQ ID NO 61611

SEQ ID NO: 111117 - protein, 167 aa, Arabidopsis thaliana; identical to SEQ ID NO: 31053
  peptide (1)..(167): Ceres Seq. ID no. 13603830

SEQ ID NO: 111118 - protein, 98 aa, Arabidopsis thaliana; identical to SEQ ID NO: 31054
  peptide (1)..(98): Ceres Seq. ID no. 13603831

SEQ ID NO: 111119 - DNA, 1066 bp, Arabidopsis thaliana; identical to SEQ ID NO: 99880
  misc_feature (1)..(1066): Ceres Seq. ID no. 13603840
  misc_feature (1)..(1066): Ortholog of  Ceres SEQ ID NO 15178847 as cited in SEQ ID NO 1145
  misc_feature (1)..(1066): Ortholog of  Ceres SEQ ID NO 14311253 as cited in SEQ ID NO 56483
  misc_feature (1)..(1066): Ortholog of  Ceres SEQ ID NO 13597435 as cited in SEQ ID NO 64073
  misc_feature (1)..(1066): Ortholog of  Ceres SEQ ID NO 13656209 as cited in SEQ ID NO 64393

SEQ ID NO: 111120 - protein, 227 aa, Arabidopsis thaliana; identical to SEQ ID NO: 30318
  peptide (1)..(227): Ceres Seq. ID no. 13603841

SEQ ID NO: 111121 - DNA, 1356 bp, Arabidopsis thaliana; identical to SEQ ID NO: 99882
  misc_feature (1)..(1356): Ceres Seq. ID no. 13603846
  misc_feature (1)..(1356): Ortholog of  Ceres SEQ ID NO 12583469 as cited in SEQ ID NO 51031
  misc_feature (1)..(1356): Ortholog of  Ceres SEQ ID NO 13597389 as cited in SEQ ID NO 63426
  misc_feature (1)..(1356): Ortholog of  Ceres SEQ ID NO 15180463 as cited in SEQ ID NO 0

SEQ ID NO: 111122 - protein, 379 aa, Arabidopsis thaliana; identical to SEQ ID NO: 30118
  peptide (1)..(379): Ceres Seq. ID no. 13603847

SEQ ID NO: 111123 - protein, 294 aa, Arabidopsis thaliana; identical to SEQ ID NO: 30119
  peptide (1)..(294): Ceres Seq. ID no. 13603848

SEQ ID NO: 111124 - protein, 208 aa, Arabidopsis thaliana; identical to SEQ ID NO: 30120
  peptide (1)..(208): Ceres Seq. ID no. 13603849

SEQ ID NO: 111125 - DNA, 798 bp, Arabidopsis thaliana; identical to SEQ ID NO: 99886
  misc_feature (1)..(798): Ceres Seq. ID no. 13603869
  misc_feature (1)..(798): Ortholog of  Ceres SEQ ID NO 13582184 as cited in SEQ ID NO 56002
  misc_feature (1)..(798): Ortholog of  Ceres SEQ ID NO 15227042 as cited in SEQ ID NO 0

SEQ ID NO: 111126 - protein, 199 aa, Arabidopsis thaliana; identical to SEQ ID NO: 36513
  peptide (1)..(199): Ceres Seq. ID no. 13603870

SEQ ID NO: 111127 - protein, 187 aa, Arabidopsis thaliana; identical to SEQ ID NO: 36514
  peptide (1)..(187): Ceres Seq. ID no. 13603871

SEQ ID NO: 111128 - protein, 134 aa, Arabidopsis thaliana; identical to SEQ ID NO: 36515
  peptide (1)..(134): Ceres Seq. ID no. 13603872

SEQ ID NO: 111129 - DNA, 1098 bp, Arabidopsis thaliana; identical to SEQ ID NO: 99890
  misc_feature (1)..(1098): Ceres Seq. ID no. 13603873
  misc_feature (1)..(1098): Ortholog of  Ceres SEQ ID NO 15171216 as cited in SEQ ID NO 59366

SEQ ID NO: 111130 - protein, 257 aa, Arabidopsis thaliana; identical to SEQ ID NO: 40362
  peptide (1)..(257): Ceres Seq. ID no. 13603874

SEQ ID NO: 111131 - protein, 181 aa, Arabidopsis thaliana; identical to SEQ ID NO: 40363
  peptide (1)..(181): Ceres Seq. ID no. 13603875

SEQ ID NO: 111132 - DNA, 856 bp, Arabidopsis thaliana; identical to SEQ ID NO: 99893
  misc_feature (1)..(856): Ceres Seq. ID no. 13603876
  misc_feature (1)..(856): Ortholog of  Ceres SEQ ID NO 13594918 as cited in SEQ ID NO 55747
  misc_feature (1)..(856): Ortholog of  Ceres SEQ ID NO 12587066 as cited in SEQ ID NO 63204

SEQ ID NO: 111133 - protein, 246 aa, Arabidopsis thaliana; identical to SEQ ID NO: 99894
  peptide (1)..(246): Ceres Seq. ID no. 13603877

SEQ ID NO: 111134 - protein, 218 aa, Arabidopsis thaliana; identical to SEQ ID NO: 42033
  peptide (1)..(218): Ceres Seq. ID no. 13603878

SEQ ID NO: 111135 - DNA, 1682 bp, Arabidopsis thaliana; identical to SEQ ID NO: 99896
  misc_feature (1)..(1682): Ceres Seq. ID no. 13603883
  misc_feature (1)..(1682): Ortholog of  Ceres SEQ ID NO 14311854 as cited in SEQ ID NO 51455
  misc_feature (1)..(1682): Ortholog of  Ceres SEQ ID NO 14313097 as cited in SEQ ID NO 58902

SEQ ID NO: 111136 - protein, 346 aa, Arabidopsis thaliana; identical to SEQ ID NO: 35235
  peptide (1)..(346): Ceres Seq. ID no. 13603884

SEQ ID NO: 111137 - protein, 332 aa, Arabidopsis thaliana; identical to SEQ ID NO: 35236
  peptide (1)..(332): Ceres Seq. ID no. 13603885

SEQ ID NO: 111138 - protein, 173 aa, Arabidopsis thaliana; identical to SEQ ID NO: 99899
  peptide (1)..(173): Ceres Seq. ID no. 13603886

SEQ ID NO: 111139 - DNA, 2140 bp, Arabidopsis thaliana; identical to SEQ ID NO: 99900
  misc_feature (1)..(2140): Ceres Seq. ID no. 13603887
  misc_feature (1)..(2140): Ortholog of  Ceres SEQ ID NO 12597287 as cited in SEQ ID NO 63982

SEQ ID NO: 111140 - protein, 531 aa, Arabidopsis thaliana; identical to SEQ ID NO: 99901
  peptide (1)..(531): Ceres Seq. ID no. 13603888

SEQ ID NO: 111141 - protein, 478 aa, Arabidopsis thaliana; identical to SEQ ID NO: 99902
  peptide (1)..(478): Ceres Seq. ID no. 13603889

SEQ ID NO: 111142 - protein, 452 aa, Arabidopsis thaliana; identical to SEQ ID NO: 99903
  peptide (1)..(452): Ceres Seq. ID no. 13603890

SEQ ID NO: 111143 - DNA, 1834 bp, Arabidopsis thaliana; identical to SEQ ID NO: 99904
  misc_feature (1)..(1834): Ceres Seq. ID no. 13603891
  misc_feature (1)..(1834): Ortholog of  Ceres SEQ ID NO 15171476 as cited in SEQ ID NO 55569
  misc_feature (1)..(1834): Ortholog of  Ceres SEQ ID NO 14312069 as cited in SEQ ID NO 59191

SEQ ID NO: 111144 - protein, 541 aa, Arabidopsis thaliana; identical to SEQ ID NO: 99905
  peptide (1)..(541): Ceres Seq. ID no. 13603892

SEQ ID NO: 111145 - protein, 516 aa, Arabidopsis thaliana; identical to SEQ ID NO: 42712
  peptide (1)..(516): Ceres Seq. ID no. 13603893

SEQ ID NO: 111146 - protein, 439 aa, Arabidopsis thaliana; identical to SEQ ID NO: 42713
  peptide (1)..(439): Ceres Seq. ID no. 13603894

SEQ ID NO: 111147 - DNA, 1176 bp, Arabidopsis thaliana; identical to SEQ ID NO: 99908
  misc_feature (1)..(1176): Ceres Seq. ID no. 13603895
  misc_feature (1)..(1176): Ortholog of  Ceres SEQ ID NO 13586635 as cited in SEQ ID NO 14217
  misc_feature (1)..(1176): Ortholog of  Ceres SEQ ID NO 15170220 as cited in SEQ ID NO 55383
  misc_feature (1)..(1176): Ortholog of  Ceres SEQ ID NO 14304198 as cited in SEQ ID NO 56479
  misc_feature (1)..(1176): Ortholog of  Ceres SEQ ID NO 14316543 as cited in SEQ ID NO 57118
  misc_feature (1)..(1176): Ortholog of  Ceres SEQ ID NO 12616285 as cited in SEQ ID NO 63483

SEQ ID NO: 111148 - protein, 324 aa, Arabidopsis thaliana; identical to SEQ ID NO: 29756
  peptide (1)..(324): Ceres Seq. ID no. 13603896

SEQ ID NO: 111149 - protein, 309 aa, Arabidopsis thaliana; identical to SEQ ID NO: 29757
  peptide (1)..(309): Ceres Seq. ID no. 13603897

SEQ ID NO: 111150 - protein, 213 aa, Arabidopsis thaliana; identical to SEQ ID NO: 29758
  peptide (1)..(213): Ceres Seq. ID no. 13603898

SEQ ID NO: 111151 - DNA, 869 bp, Arabidopsis thaliana; identical to SEQ ID NO: 99912
  misc_feature (1)..(869): Ceres Seq. ID no. 13603920
  misc_feature (1)..(869): Ortholog of  Ceres SEQ ID NO 15176177 as cited in SEQ ID NO 0

SEQ ID NO: 111152 - protein, 207 aa, Arabidopsis thaliana; identical to SEQ ID NO: 99913
  peptide (1)..(207): Ceres Seq. ID no. 13603921

SEQ ID NO: 111153 - protein, 198 aa, Arabidopsis thaliana; identical to SEQ ID NO: 22651
  peptide (1)..(198): Ceres Seq. ID no. 13603922

SEQ ID NO: 111154 - protein, 136 aa, Arabidopsis thaliana; identical to SEQ ID NO: 22652
  peptide (1)..(136): Ceres Seq. ID no. 13603923

SEQ ID NO: 111155 - DNA, 902 bp, Arabidopsis thaliana; identical to SEQ ID NO: 99916
  misc_feature (1)..(902): Ceres Seq. ID no. 13603924
  misc_feature (1)..(902): Ortholog of  Ceres SEQ ID NO 13656068 as cited in SEQ ID NO 69047

SEQ ID NO: 111156 - protein, 207 aa, Arabidopsis thaliana; identical to SEQ ID NO: 99917
  peptide (1)..(207): Ceres Seq. ID no. 13603925

SEQ ID NO: 111157 - protein, 133 aa, Arabidopsis thaliana; identical to SEQ ID NO: 34753
  peptide (1)..(133): Ceres Seq. ID no. 13603926

SEQ ID NO: 111158 - protein, 125 aa, Arabidopsis thaliana; identical to SEQ ID NO: 34754
  peptide (1)..(125): Ceres Seq. ID no. 13603927

SEQ ID NO: 111159 - DNA, 2332 bp, Arabidopsis thaliana; identical to SEQ ID NO: 99920
  misc_feature (1)..(2332): Ceres Seq. ID no. 13603928
  misc_feature (1)..(2332): Ortholog of  Ceres SEQ ID NO 14306279 as cited in SEQ ID NO 56860

SEQ ID NO: 111160 - protein, 729 aa, Arabidopsis thaliana; identical to SEQ ID NO: 26588
  peptide (1)..(729): Ceres Seq. ID no. 13603929

SEQ ID NO: 111161 - protein, 693 aa, Arabidopsis thaliana; identical to SEQ ID NO: 26589
  peptide (1)..(693): Ceres Seq. ID no. 13603930

SEQ ID NO: 111162 - protein, 622 aa, Arabidopsis thaliana; identical to SEQ ID NO: 26590
  peptide (1)..(622): Ceres Seq. ID no. 13603931

SEQ ID NO: 111163 - DNA, 1215 bp, Arabidopsis thaliana; identical to SEQ ID NO: 99924
  misc_feature (1)..(1215): Ceres Seq. ID no. 13603936
  misc_feature (1)..(1215): Ortholog of  Ceres SEQ ID NO 12608945 as cited in SEQ ID NO 51209
  misc_feature (1)..(1215): Ortholog of  Ceres SEQ ID NO 12619999 as cited in SEQ ID NO 66123
  misc_feature (1)..(1215): Ortholog of  Ceres SEQ ID NO 13656436 as cited in SEQ ID NO 69154

SEQ ID NO: 111164 - protein, 276 aa, Arabidopsis thaliana; identical to SEQ ID NO: 99925
  peptide (1)..(276): Ceres Seq. ID no. 13603937

SEQ ID NO: 111165 - protein, 200 aa, Arabidopsis thaliana; identical to SEQ ID NO: 24213
  peptide (1)..(200): Ceres Seq. ID no. 13603938

SEQ ID NO: 111166 - DNA, 1408 bp, Arabidopsis thaliana; identical to SEQ ID NO: 99927
  misc_feature (1)..(1408): Ceres Seq. ID no. 13603939
  misc_feature (1)..(1408): Ortholog of  Ceres SEQ ID NO 13656404 as cited in SEQ ID NO 65806
  misc_feature (1)..(1408): Ortholog of  Ceres SEQ ID NO 12779935 as cited in SEQ ID NO 66774
  misc_feature (1)..(1408): Ortholog of  Ceres SEQ ID NO 13598695 as cited in SEQ ID NO 67368
  misc_feature (1)..(1408): Ortholog of  Ceres SEQ ID NO 13591174 as cited in SEQ ID NO 68289

SEQ ID NO: 111167 - protein, 391 aa, Arabidopsis thaliana; identical to SEQ ID NO: 24787
  peptide (1)..(391): Ceres Seq. ID no. 13603940

SEQ ID NO: 111168 - protein, 385 aa, Arabidopsis thaliana; identical to SEQ ID NO: 24788
  peptide (1)..(385): Ceres Seq. ID no. 13603941

SEQ ID NO: 111169 - protein, 328 aa, Arabidopsis thaliana; identical to SEQ ID NO: 24789
  peptide (1)..(328): Ceres Seq. ID no. 13603942

SEQ ID NO: 111170 - DNA, 772 bp, Arabidopsis thaliana; identical to SEQ ID NO: 99931
  misc_feature (1)..(772): Ceres Seq. ID no. 13603962
  misc_feature (1)..(772): Ortholog of  Ceres SEQ ID NO 12608262 as cited in SEQ ID NO 57800

SEQ ID NO: 111171 - protein, 212 aa, Arabidopsis thaliana; identical to SEQ ID NO: 99932
  peptide (1)..(212): Ceres Seq. ID no. 13603963

SEQ ID NO: 111172 - protein, 208 aa, Arabidopsis thaliana; identical to SEQ ID NO: 99933
  peptide (1)..(208): Ceres Seq. ID no. 13603964

SEQ ID NO: 111173 - DNA, 1056 bp, Arabidopsis thaliana; identical to SEQ ID NO: 99934
  misc_feature (1)..(1056): Ceres Seq. ID no. 13603965
  misc_feature (1)..(1056): Ortholog of  Ceres SEQ ID NO 12558659 as cited in SEQ ID NO 20727
  misc_feature (1)..(1056): Ortholog of  Ceres SEQ ID NO 14314534 as cited in SEQ ID NO 52434
  misc_feature (1)..(1056): Ortholog of  Ceres SEQ ID NO 15175034 as cited in SEQ ID NO 62432
  misc_feature (1)..(1056): Ortholog of  Ceres SEQ ID NO 12619999 as cited in SEQ ID NO 66123
  misc_feature (1)..(1056): Ortholog of  Ceres SEQ ID NO 13656436 as cited in SEQ ID NO 69154

SEQ ID NO: 111174 - protein, 216 aa, Arabidopsis thaliana; identical to SEQ ID NO: 39012
  peptide (1)..(216): Ceres Seq. ID no. 13603966

SEQ ID NO: 111175 - DNA, 1239 bp, Arabidopsis thaliana; identical to SEQ ID NO: 99936
  misc_feature (1)..(1239): Ceres Seq. ID no. 13603971
  misc_feature (1)..(1239): Ortholog of  Ceres SEQ ID NO 13502952 as cited in SEQ ID NO 62271
  misc_feature (1)..(1239): Ortholog of  Ceres SEQ ID NO 13502973 as cited in SEQ ID NO 68052
  misc_feature (1)..(1239): Ortholog of  Ceres SEQ ID NO 13596000 as cited in SEQ ID NO 68188
  misc_feature (1)..(1239): Ortholog of  Ceres SEQ ID NO 15179420 as cited in SEQ ID NO 0

SEQ ID NO: 111176 - protein, 346 aa, Arabidopsis thaliana; identical to SEQ ID NO: 36431
  peptide (1)..(346): Ceres Seq. ID no. 13603972

SEQ ID NO: 111177 - protein, 341 aa, Arabidopsis thaliana; identical to SEQ ID NO: 36432
  peptide (1)..(341): Ceres Seq. ID no. 13603973

SEQ ID NO: 111178 - protein, 313 aa, Arabidopsis thaliana; identical to SEQ ID NO: 36433
  peptide (1)..(313): Ceres Seq. ID no. 13603974

SEQ ID NO: 111179 - DNA, 1277 bp, Arabidopsis thaliana; identical to SEQ ID NO: 99940
  misc_feature (1)..(1277): Ceres Seq. ID no. 13603975
  misc_feature (1)..(1277): Ortholog of  Ceres SEQ ID NO 13592961 as cited in SEQ ID NO 20522
  misc_feature (1)..(1277): Ortholog of  Ceres SEQ ID NO 12583469 as cited in SEQ ID NO 51031
  misc_feature (1)..(1277): Ortholog of  Ceres SEQ ID NO 13596527 as cited in SEQ ID NO 62582
  misc_feature (1)..(1277): Ortholog of  Ceres SEQ ID NO 15226378 as cited in SEQ ID NO 62741
  misc_feature (1)..(1277): Ortholog of  Ceres SEQ ID NO 13597389 as cited in SEQ ID NO 63426
  misc_feature (1)..(1277): Ortholog of  Ceres SEQ ID NO 15169639 as cited in SEQ ID NO 64624
  misc_feature (1)..(1277): Ortholog of  Ceres SEQ ID NO 14303071 as cited in SEQ ID NO 67114
  misc_feature (1)..(1277): Ortholog of  Ceres SEQ ID NO 13595998 as cited in SEQ ID NO 68161
  misc_feature (1)..(1277): Ortholog of  Ceres SEQ ID NO 14303635 as cited in SEQ ID NO 68503

SEQ ID NO: 111180 - protein, 384 aa, Arabidopsis thaliana; identical to SEQ ID NO: 99941
  peptide (1)..(384): Ceres Seq. ID no. 13603976

SEQ ID NO: 111181 - protein, 372 aa, Arabidopsis thaliana; identical to SEQ ID NO: 99942
  peptide (1)..(372): Ceres Seq. ID no. 13603977

SEQ ID NO: 111182 - protein, 368 aa, Arabidopsis thaliana; identical to SEQ ID NO: 99943
  peptide (1)..(368): Ceres Seq. ID no. 13603978

SEQ ID NO: 111183 - DNA, 1245 bp, Arabidopsis thaliana; identical to SEQ ID NO: 99944
  misc_feature (1)..(1245): Ceres Seq. ID no. 13603979
  misc_feature (1)..(1245): Ortholog of  Ceres SEQ ID NO 13593955 as cited in SEQ ID NO 54278
  misc_feature (1)..(1245): Ortholog of  Ceres SEQ ID NO 13597380 as cited in SEQ ID NO 64054
  misc_feature (1)..(1245): Ortholog of  Ceres SEQ ID NO 12625474 as cited in SEQ ID NO 64169
  misc_feature (1)..(1245): Ortholog of  Ceres SEQ ID NO 13597502 as cited in SEQ ID NO 64681

SEQ ID NO: 111184 - protein, 357 aa, Arabidopsis thaliana; identical to SEQ ID NO: 99945
  peptide (1)..(357): Ceres Seq. ID no. 13603980

SEQ ID NO: 111185 - protein, 297 aa, Arabidopsis thaliana; identical to SEQ ID NO: 34920
  peptide (1)..(297): Ceres Seq. ID no. 13603981

SEQ ID NO: 111186 - protein, 263 aa, Arabidopsis thaliana; identical to SEQ ID NO: 34921
  peptide (1)..(263): Ceres Seq. ID no. 13603982

SEQ ID NO: 111187 - DNA, 1318 bp, Arabidopsis thaliana; identical to SEQ ID NO: 99948
  misc_feature (1)..(1318): Ceres Seq. ID no. 13603983
  misc_feature (1)..(1318): Ortholog of  Ceres SEQ ID NO 13593955 as cited in SEQ ID NO 54278
  misc_feature (1)..(1318): Ortholog of  Ceres SEQ ID NO 13655302 as cited in SEQ ID NO 63307
  misc_feature (1)..(1318): Ortholog of  Ceres SEQ ID NO 13597380 as cited in SEQ ID NO 64054
  misc_feature (1)..(1318): Ortholog of  Ceres SEQ ID NO 12625474 as cited in SEQ ID NO 64169
  misc_feature (1)..(1318): Ortholog of  Ceres SEQ ID NO 13597502 as cited in SEQ ID NO 64681

SEQ ID NO: 111188 - protein, 388 aa, Arabidopsis thaliana; identical to SEQ ID NO: 99949
  peptide (1)..(388): Ceres Seq. ID no. 13603984

SEQ ID NO: 111189 - protein, 375 aa, Arabidopsis thaliana; identical to SEQ ID NO: 99950
  peptide (1)..(375): Ceres Seq. ID no. 13603985

SEQ ID NO: 111190 - protein, 211 aa, Arabidopsis thaliana; identical to SEQ ID NO: 99951
  peptide (1)..(211): Ceres Seq. ID no. 13603986

SEQ ID NO: 111191 - DNA, 889 bp, Arabidopsis thaliana; identical to SEQ ID NO: 99952
  misc_feature (1)..(889): Ceres Seq. ID no. 13603987
  misc_feature (1)..(889): Ortholog of  Ceres SEQ ID NO 15172893 as cited in SEQ ID NO 51869
  misc_feature (1)..(889): Ortholog of  Ceres SEQ ID NO 12610734 as cited in SEQ ID NO 56268
  misc_feature (1)..(889): Ortholog of  Ceres SEQ ID NO 13655072 as cited in SEQ ID NO 62639

SEQ ID NO: 111192 - protein, 230 aa, Arabidopsis thaliana; identical to SEQ ID NO: 99953
  peptide (1)..(230): Ceres Seq. ID no. 13603988

SEQ ID NO: 111193 - protein, 164 aa, Arabidopsis thaliana; identical to SEQ ID NO: 40513
  peptide (1)..(164): Ceres Seq. ID no. 13603989

SEQ ID NO: 111194 - DNA, 1430 bp, Arabidopsis thaliana; identical to SEQ ID NO: 99955
  misc_feature (1)..(1430): Ceres Seq. ID no. 13603990
  misc_feature (1)..(1430): Ortholog of  Ceres SEQ ID NO 13597805 as cited in SEQ ID NO 64186

SEQ ID NO: 111195 - protein, 343 aa, Arabidopsis thaliana; identical to SEQ ID NO: 99956
  peptide (1)..(343): Ceres Seq. ID no. 13603991

SEQ ID NO: 111196 - protein, 342 aa, Arabidopsis thaliana; identical to SEQ ID NO: 99957
  peptide (1)..(342): Ceres Seq. ID no. 13603992

SEQ ID NO: 111197 - protein, 336 aa, Arabidopsis thaliana; identical to SEQ ID NO: 99958
  peptide (1)..(336): Ceres Seq. ID no. 13603993

SEQ ID NO: 111198 - DNA, 1459 bp, Arabidopsis thaliana; identical to SEQ ID NO: 99959
  misc_feature (1)..(1459): Ceres Seq. ID no. 13603994
  misc_feature (1)..(1459): Ortholog of  Ceres SEQ ID NO 15177858 as cited in SEQ ID NO 51624
  misc_feature (1)..(1459): Ortholog of  Ceres SEQ ID NO 15171249 as cited in SEQ ID NO 52276
  misc_feature (1)..(1459): Ortholog of  Ceres SEQ ID NO 13594189 as cited in SEQ ID NO 58890

SEQ ID NO: 111199 - protein, 485 aa, Arabidopsis thaliana; identical to SEQ ID NO: 99960
  peptide (1)..(485): Ceres Seq. ID no. 13603995

SEQ ID NO: 111200 - protein, 438 aa, Arabidopsis thaliana; identical to SEQ ID NO: 76506
  peptide (1)..(438): Ceres Seq. ID no. 13603996

SEQ ID NO: 111201 - protein, 408 aa, Arabidopsis thaliana; identical to SEQ ID NO: 76507
  peptide (1)..(408): Ceres Seq. ID no. 13603997

SEQ ID NO: 111202 - DNA, 1209 bp, Arabidopsis thaliana; identical to SEQ ID NO: 99963
  misc_feature (1)..(1209): Ceres Seq. ID no. 13603998
  misc_feature (1)..(1209): Ortholog of  Ceres SEQ ID NO 13597019 as cited in SEQ ID NO 64303
  misc_feature (1)..(1209): Ortholog of  Ceres SEQ ID NO 13654191 as cited in SEQ ID NO 68235

SEQ ID NO: 111203 - protein, 327 aa, Arabidopsis thaliana; identical to SEQ ID NO: 99964
  peptide (1)..(327): Ceres Seq. ID no. 13603999

SEQ ID NO: 111204 - protein, 240 aa, Arabidopsis thaliana; identical to SEQ ID NO: 99965
  peptide (1)..(240): Ceres Seq. ID no. 13604000

SEQ ID NO: 111205 - protein, 227 aa, Arabidopsis thaliana; identical to SEQ ID NO: 99966
  peptide (1)..(227): Ceres Seq. ID no. 13604001

SEQ ID NO: 111206 - DNA, 1109 bp, Arabidopsis thaliana; identical to SEQ ID NO: 99967
  misc_feature (1)..(1109): Ceres Seq. ID no. 13604002
  misc_feature (1)..(1109): Ortholog of  Ceres SEQ ID NO 13639514 as cited in SEQ ID NO 55736
  misc_feature (1)..(1109): Ortholog of  Ceres SEQ ID NO 14312254 as cited in SEQ ID NO 59148
  misc_feature (1)..(1109): Ortholog of  Ceres SEQ ID NO 13662804 as cited in SEQ ID NO 65394
  misc_feature (1)..(1109): Ortholog of  Ceres SEQ ID NO 13656519 as cited in SEQ ID NO 69226

SEQ ID NO: 111207 - protein, 226 aa, Arabidopsis thaliana; identical to SEQ ID NO: 37799
  peptide (1)..(226): Ceres Seq. ID no. 13604003

SEQ ID NO: 111208 - protein, 206 aa, Arabidopsis thaliana; identical to SEQ ID NO: 37800
  peptide (1)..(206): Ceres Seq. ID no. 13604004

SEQ ID NO: 111209 - protein, 171 aa, Arabidopsis thaliana; identical to SEQ ID NO: 37801
  peptide (1)..(171): Ceres Seq. ID no. 13604005

SEQ ID NO: 111210 - DNA, 783 bp, Arabidopsis thaliana; identical to SEQ ID NO: 99971
  misc_feature (1)..(783): Ceres Seq. ID no. 13604010
  misc_feature (1)..(783): Ortholog of  Ceres SEQ ID NO 13582388 as cited in SEQ ID NO 56812
  misc_feature (1)..(783): Ortholog of  Ceres SEQ ID NO 14305353 as cited in SEQ ID NO 57710

SEQ ID NO: 111211 - protein, 221 aa, Arabidopsis thaliana; identical to SEQ ID NO: 99972
  peptide (1)..(221): Ceres Seq. ID no. 13604011

SEQ ID NO: 111212 - protein, 218 aa, Arabidopsis thaliana; identical to SEQ ID NO: 99973
  peptide (1)..(218): Ceres Seq. ID no. 13604012

SEQ ID NO: 111213 - protein, 214 aa, Arabidopsis thaliana; identical to SEQ ID NO: 99974
  peptide (1)..(214): Ceres Seq. ID no. 13604013

SEQ ID NO: 111214 - DNA, 1727 bp, Arabidopsis thaliana; identical to SEQ ID NO: 99975
  misc_feature (1)..(1727): Ceres Seq. ID no. 13604018
  misc_feature (1)..(1727): Ortholog of  Ceres SEQ ID NO 14312293 as cited in SEQ ID NO 58744
  misc_feature (1)..(1727): Ortholog of  Ceres SEQ ID NO 15177596 as cited in SEQ ID NO 59731

SEQ ID NO: 111215 - protein, 431 aa, Arabidopsis thaliana; identical to SEQ ID NO: 34946
  peptide (1)..(431): Ceres Seq. ID no. 13604019

SEQ ID NO: 111216 - protein, 306 aa, Arabidopsis thaliana; identical to SEQ ID NO: 34947
  peptide (1)..(306): Ceres Seq. ID no. 13604020

SEQ ID NO: 111217 - protein, 301 aa, Arabidopsis thaliana; identical to SEQ ID NO: 34948
  peptide (1)..(301): Ceres Seq. ID no. 13604021

SEQ ID NO: 111218 - DNA, 1433 bp, Arabidopsis thaliana; identical to SEQ ID NO: 99979
  misc_feature (1)..(1433): Ceres Seq. ID no. 13604025
  misc_feature (1)..(1433): Ortholog of  Ceres SEQ ID NO 13598741 as cited in SEQ ID NO 62749
  misc_feature (1)..(1433): Ortholog of  Ceres SEQ ID NO 12587535 as cited in SEQ ID NO 64020
  misc_feature (1)..(1433): Ortholog of  Ceres SEQ ID NO 15176854 as cited in SEQ ID NO 64525
  misc_feature (1)..(1433): Ortholog of  Ceres SEQ ID NO 12586366 as cited in SEQ ID NO 68983
  misc_feature (1)..(1433): Ortholog of  Ceres SEQ ID NO 15178891 as cited in SEQ ID NO 0

SEQ ID NO: 111219 - protein, 382 aa, Arabidopsis thaliana; identical to SEQ ID NO: 25994
  peptide (1)..(382): Ceres Seq. ID no. 13604026

SEQ ID NO: 111220 - protein, 369 aa, Arabidopsis thaliana; identical to SEQ ID NO: 25995
  peptide (1)..(369): Ceres Seq. ID no. 13604027

SEQ ID NO: 111221 - protein, 352 aa, Arabidopsis thaliana; identical to SEQ ID NO: 25996
  peptide (1)..(352): Ceres Seq. ID no. 13604028

SEQ ID NO: 111222 - DNA, 1390 bp, Arabidopsis thaliana; identical to SEQ ID NO: 99983
  misc_feature (1)..(1390): Ceres Seq. ID no. 13604029
  misc_feature (1)..(1390): Ortholog of  Ceres SEQ ID NO 13597161 as cited in SEQ ID NO 63998

SEQ ID NO: 111223 - protein, 383 aa, Arabidopsis thaliana; identical to SEQ ID NO: 99984
  peptide (1)..(383): Ceres Seq. ID no. 13604030

SEQ ID NO: 111224 - protein, 357 aa, Arabidopsis thaliana; identical to SEQ ID NO: 99985
  peptide (1)..(357): Ceres Seq. ID no. 13604031

SEQ ID NO: 111225 - protein, 352 aa, Arabidopsis thaliana; identical to SEQ ID NO: 99986
  peptide (1)..(352): Ceres Seq. ID no. 13604032

SEQ ID NO: 111226 - DNA, 2153 bp, Arabidopsis thaliana; identical to SEQ ID NO: 99987
  misc_feature (1)..(2153): Ceres Seq. ID no. 13604033
  misc_feature (1)..(2153): Ortholog of  Ceres SEQ ID NO 14306375 as cited in SEQ ID NO 59766
  misc_feature (1)..(2153): Ortholog of  Ceres SEQ ID NO 13599322 as cited in SEQ ID NO 0

SEQ ID NO: 111227 - protein, 500 aa, Arabidopsis thaliana; identical to SEQ ID NO: 40478
  peptide (1)..(500): Ceres Seq. ID no. 13604034

SEQ ID NO: 111228 - protein, 447 aa, Arabidopsis thaliana; identical to SEQ ID NO: 40479
  peptide (1)..(447): Ceres Seq. ID no. 13604035

SEQ ID NO: 111229 - protein, 364 aa, Arabidopsis thaliana; identical to SEQ ID NO: 40480
  peptide (1)..(364): Ceres Seq. ID no. 13604036

SEQ ID NO: 111230 - DNA, 1937 bp, Arabidopsis thaliana; identical to SEQ ID NO: 99991
  misc_feature (1)..(1937): Ceres Seq. ID no. 13604041
  misc_feature (1)..(1937): Ortholog of  Ceres SEQ ID NO 13657677 as cited in SEQ ID NO 66119

SEQ ID NO: 111231 - protein, 586 aa, Arabidopsis thaliana; identical to SEQ ID NO: 99992
  peptide (1)..(586): Ceres Seq. ID no. 13604042

SEQ ID NO: 111232 - protein, 574 aa, Arabidopsis thaliana; identical to SEQ ID NO: 99993
  peptide (1)..(574): Ceres Seq. ID no. 13604043

SEQ ID NO: 111233 - protein, 561 aa, Arabidopsis thaliana; identical to SEQ ID NO: 99994
  peptide (1)..(561): Ceres Seq. ID no. 13604044

SEQ ID NO: 111234 - DNA, 1164 bp, Arabidopsis thaliana; identical to SEQ ID NO: 99995
  misc_feature (1)..(1164): Ceres Seq. ID no. 13604064
  misc_feature (1)..(1164): Ortholog of  Ceres SEQ ID NO 12611829 as cited in SEQ ID NO 56771
  misc_feature (1)..(1164): Ortholog of  Ceres SEQ ID NO 15171735 as cited in SEQ ID NO 57234
  misc_feature (1)..(1164): Ortholog of  Ceres SEQ ID NO 13597018 as cited in SEQ ID NO 64288
  misc_feature (1)..(1164): Ortholog of  Ceres SEQ ID NO 14305124 as cited in SEQ ID NO 0

SEQ ID NO: 111235 - protein, 320 aa, Arabidopsis thaliana; identical to SEQ ID NO: 99996
  peptide (1)..(320): Ceres Seq. ID no. 13604065

SEQ ID NO: 111236 - protein, 275 aa, Arabidopsis thaliana; identical to SEQ ID NO: 99997
  peptide (1)..(275): Ceres Seq. ID no. 13604066

SEQ ID NO: 111237 - protein, 239 aa, Arabidopsis thaliana; identical to SEQ ID NO: 99998
  peptide (1)..(239): Ceres Seq. ID no. 13604067

SEQ ID NO: 111238 - DNA, 1075 bp, Arabidopsis thaliana; identical to SEQ ID NO: 99999
  misc_feature (1)..(1075): Ceres Seq. ID no. 13604068
  misc_feature (1)..(1075): Ortholog of  Ceres SEQ ID NO 12562983 as cited in SEQ ID NO 53309
  misc_feature (1)..(1075): Ortholog of  Ceres SEQ ID NO 14309224 as cited in SEQ ID NO 0

SEQ ID NO: 111239 - protein, 308 aa, Arabidopsis thaliana; identical to SEQ ID NO: 100000
  peptide (1)..(308): Ceres Seq. ID no. 13604069

SEQ ID NO: 111240 - protein, 204 aa, Arabidopsis thaliana; identical to SEQ ID NO: 100001
  peptide (1)..(204): Ceres Seq. ID no. 13604070

SEQ ID NO: 111241 - protein, 198 aa, Arabidopsis thaliana; identical to SEQ ID NO: 100002
  peptide (1)..(198): Ceres Seq. ID no. 13604071

SEQ ID NO: 111242 - DNA, 1792 bp, Arabidopsis thaliana; identical to SEQ ID NO: 100003
  misc_feature (1)..(1792): Ceres Seq. ID no. 13604072
  misc_feature (1)..(1792): Ortholog of  Ceres SEQ ID NO 15176959 as cited in SEQ ID NO 52610
  misc_feature (1)..(1792): Ortholog of  Ceres SEQ ID NO 15176571 as cited in SEQ ID NO 54430

SEQ ID NO: 111243 - protein, 375 aa, Arabidopsis thaliana; identical to SEQ ID NO: 41738
  peptide (1)..(375): Ceres Seq. ID no. 13604073

SEQ ID NO: 111244 - protein, 304 aa, Arabidopsis thaliana; identical to SEQ ID NO: 41739
  peptide (1)..(304): Ceres Seq. ID no. 13604074

SEQ ID NO: 111245 - protein, 232 aa, Arabidopsis thaliana; identical to SEQ ID NO: 41740
  peptide (1)..(232): Ceres Seq. ID no. 13604075

SEQ ID NO: 111246 - DNA, 1387 bp, Arabidopsis thaliana; identical to SEQ ID NO: 100007
  misc_feature (1)..(1387): Ceres Seq. ID no. 13604088
  misc_feature (1)..(1387): Ortholog of  Ceres SEQ ID NO 13582619 as cited in SEQ ID NO 56520
  misc_feature (1)..(1387): Ortholog of  Ceres SEQ ID NO 13660872 as cited in SEQ ID NO 60830

SEQ ID NO: 111247 - protein, 421 aa, Arabidopsis thaliana; identical to SEQ ID NO: 100008
  peptide (1)..(421): Ceres Seq. ID no. 13604089

SEQ ID NO: 111248 - protein, 340 aa, Arabidopsis thaliana; identical to SEQ ID NO: 41503
  peptide (1)..(340): Ceres Seq. ID no. 13604090

SEQ ID NO: 111249 - protein, 325 aa, Arabidopsis thaliana; identical to SEQ ID NO: 41504
  peptide (1)..(325): Ceres Seq. ID no. 13604091

SEQ ID NO: 111250 - DNA, 913 bp, Arabidopsis thaliana; identical to SEQ ID NO: 100011
  misc_feature (1)..(913): Ceres Seq. ID no. 13604104
  misc_feature (1)..(913): Ortholog of  Ceres SEQ ID NO 13646254 as cited in SEQ ID NO 20314
  misc_feature (1)..(913): Ortholog of  Ceres SEQ ID NO 13639196 as cited in SEQ ID NO 56195
  misc_feature (1)..(913): Ortholog of  Ceres SEQ ID NO 15179459 as cited in SEQ ID NO 0

SEQ ID NO: 111251 - protein, 172 aa, Arabidopsis thaliana; identical to SEQ ID NO: 42548
  peptide (1)..(172): Ceres Seq. ID no. 13604105

SEQ ID NO: 111252 - DNA, 816 bp, Arabidopsis thaliana; identical to SEQ ID NO: 100013
  misc_feature (1)..(816): Ceres Seq. ID no. 13604113
  misc_feature (1)..(816): Ortholog of  Ceres SEQ ID NO 14314867 as cited in SEQ ID NO 58301
  misc_feature (1)..(816): Ortholog of  Ceres SEQ ID NO 14308084 as cited in SEQ ID NO 58549

SEQ ID NO: 111253 - protein, 202 aa, Arabidopsis thaliana; identical to SEQ ID NO: 35753
  peptide (1)..(202): Ceres Seq. ID no. 13604114

SEQ ID NO: 111254 - DNA, 1226 bp, Arabidopsis thaliana; identical to SEQ ID NO: 100015
  misc_feature (1)..(1226): Ceres Seq. ID no. 13604118
  misc_feature (1)..(1226): Ortholog of  Ceres SEQ ID NO 14304823 as cited in SEQ ID NO 54902

SEQ ID NO: 111255 - protein, 336 aa, Arabidopsis thaliana; identical to SEQ ID NO: 39866
  peptide (1)..(336): Ceres Seq. ID no. 13604119

SEQ ID NO: 111256 - protein, 272 aa, Arabidopsis thaliana; identical to SEQ ID NO: 39867
  peptide (1)..(272): Ceres Seq. ID no. 13604120

SEQ ID NO: 111257 - protein, 270 aa, Arabidopsis thaliana; identical to SEQ ID NO: 39868
  peptide (1)..(270): Ceres Seq. ID no. 13604121

SEQ ID NO: 111258 - DNA, 1718 bp, Arabidopsis thaliana; identical to SEQ ID NO: 100019
  misc_feature (1)..(1718): Ceres Seq. ID no. 13604122
  misc_feature (1)..(1718): Ortholog of  Ceres SEQ ID NO 13655298 as cited in SEQ ID NO 68914
  misc_feature (1)..(1718): Ortholog of  Ceres SEQ ID NO 13656501 as cited in SEQ ID NO 69206

SEQ ID NO: 111259 - protein, 409 aa, Arabidopsis thaliana; identical to SEQ ID NO: 30400
  peptide (1)..(409): Ceres Seq. ID no. 13604123

SEQ ID NO: 111260 - protein, 381 aa, Arabidopsis thaliana; identical to SEQ ID NO: 30401
  peptide (1)..(381): Ceres Seq. ID no. 13604124

SEQ ID NO: 111261 - protein, 378 aa, Arabidopsis thaliana; identical to SEQ ID NO: 30402
  peptide (1)..(378): Ceres Seq. ID no. 13604125

SEQ ID NO: 111262 - DNA, 2290 bp, Arabidopsis thaliana; identical to SEQ ID NO: 100023
  misc_feature (1)..(2290): Ceres Seq. ID no. 13604130
  misc_feature (1)..(2290): Ortholog of  Ceres SEQ ID NO 13597706 as cited in SEQ ID NO 65326

SEQ ID NO: 111263 - protein, 701 aa, Arabidopsis thaliana; identical to SEQ ID NO: 100024
  peptide (1)..(701): Ceres Seq. ID no. 13604131

SEQ ID NO: 111264 - protein, 583 aa, Arabidopsis thaliana; identical to SEQ ID NO: 100025
  peptide (1)..(583): Ceres Seq. ID no. 13604132

SEQ ID NO: 111265 - protein, 560 aa, Arabidopsis thaliana; identical to SEQ ID NO: 100026
  peptide (1)..(560): Ceres Seq. ID no. 13604133

SEQ ID NO: 111266 - DNA, 1109 bp, Arabidopsis thaliana; identical to SEQ ID NO: 100027
  misc_feature (1)..(1109): Ceres Seq. ID no. 13604134
  misc_feature (1)..(1109): Ortholog of  Ceres SEQ ID NO 13594794 as cited in SEQ ID NO 51761

SEQ ID NO: 111267 - protein, 245 aa, Arabidopsis thaliana; identical to SEQ ID NO: 28199
  peptide (1)..(245): Ceres Seq. ID no. 13604135

SEQ ID NO: 111268 - protein, 208 aa, Arabidopsis thaliana; identical to SEQ ID NO: 28200
  peptide (1)..(208): Ceres Seq. ID no. 13604136

SEQ ID NO: 111269 - protein, 180 aa, Arabidopsis thaliana; identical to SEQ ID NO: 28201
  peptide (1)..(180): Ceres Seq. ID no. 13604137

SEQ ID NO: 111270 - DNA, 1086 bp, Arabidopsis thaliana; identical to SEQ ID NO: 100031
  misc_feature (1)..(1086): Ceres Seq. ID no. 13604138
  misc_feature (1)..(1086): Ortholog of  Ceres SEQ ID NO 13594193 as cited in SEQ ID NO 58558

SEQ ID NO: 111271 - protein, 275 aa, Arabidopsis thaliana; identical to SEQ ID NO: 100032
  peptide (1)..(275): Ceres Seq. ID no. 13604139

SEQ ID NO: 111272 - protein, 227 aa, Arabidopsis thaliana; identical to SEQ ID NO: 100033
  peptide (1)..(227): Ceres Seq. ID no. 13604140

SEQ ID NO: 111273 - protein, 217 aa, Arabidopsis thaliana; identical to SEQ ID NO: 100034
  peptide (1)..(217): Ceres Seq. ID no. 13604141

SEQ ID NO: 111274 - DNA, 1409 bp, Arabidopsis thaliana; identical to SEQ ID NO: 100035
  misc_feature (1)..(1409): Ceres Seq. ID no. 13604142
  misc_feature (1)..(1409): Ortholog of  Ceres SEQ ID NO 13647847 as cited in SEQ ID NO 20430
  misc_feature (1)..(1409): Ortholog of  Ceres SEQ ID NO 15171696 as cited in SEQ ID NO 59997

SEQ ID NO: 111275 - protein, 384 aa, Arabidopsis thaliana; identical to SEQ ID NO: 25526
  peptide (1)..(384): Ceres Seq. ID no. 13604143

SEQ ID NO: 111276 - protein, 359 aa, Arabidopsis thaliana; identical to SEQ ID NO: 25527
  peptide (1)..(359): Ceres Seq. ID no. 13604144

SEQ ID NO: 111277 - protein, 267 aa, Arabidopsis thaliana; identical to SEQ ID NO: 25528
  peptide (1)..(267): Ceres Seq. ID no. 13604145

SEQ ID NO: 111278 - DNA, 1838 bp, Arabidopsis thaliana; identical to SEQ ID NO: 100039
  misc_feature (1)..(1838): Ceres Seq. ID no. 13604150
  misc_feature (1)..(1838): Ortholog of  Ceres SEQ ID NO 13595142 as cited in SEQ ID NO 56671
  misc_feature (1)..(1838): Ortholog of  Ceres SEQ ID NO 15168569 as cited in SEQ ID NO 58123
  misc_feature (1)..(1838): Ortholog of  Ceres SEQ ID NO 15226382 as cited in SEQ ID NO 63295
  misc_feature (1)..(1838): Ortholog of  Ceres SEQ ID NO 13598460 as cited in SEQ ID NO 63382
  misc_feature (1)..(1838): Ortholog of  Ceres SEQ ID NO 13597403 as cited in SEQ ID NO 64085

SEQ ID NO: 111279 - protein, 406 aa, Arabidopsis thaliana; identical to SEQ ID NO: 40291
  peptide (1)..(406): Ceres Seq. ID no. 13604151

SEQ ID NO: 111280 - protein, 359 aa, Arabidopsis thaliana; identical to SEQ ID NO: 40292
  peptide (1)..(359): Ceres Seq. ID no. 13604152

SEQ ID NO: 111281 - protein, 347 aa, Arabidopsis thaliana; identical to SEQ ID NO: 40293
  peptide (1)..(347): Ceres Seq. ID no. 13604153

SEQ ID NO: 111282 - DNA, 1305 bp, Arabidopsis thaliana; identical to SEQ ID NO: 100043
  misc_feature (1)..(1305): Ceres Seq. ID no. 13604154
  misc_feature (1)..(1305): Ortholog of  Ceres SEQ ID NO 12612361 as cited in SEQ ID NO 51594

SEQ ID NO: 111283 - protein, 282 aa, Arabidopsis thaliana; identical to SEQ ID NO: 29001
  peptide (1)..(282): Ceres Seq. ID no. 13604155

SEQ ID NO: 111284 - protein, 240 aa, Arabidopsis thaliana; identical to SEQ ID NO: 29002
  peptide (1)..(240): Ceres Seq. ID no. 13604156

SEQ ID NO: 111285 - protein, 157 aa, Arabidopsis thaliana; identical to SEQ ID NO: 29003
  peptide (1)..(157): Ceres Seq. ID no. 13604157

SEQ ID NO: 111286 - DNA, 1412 bp, Arabidopsis thaliana; identical to SEQ ID NO: 100047
  misc_feature (1)..(1412): Ceres Seq. ID no. 13604158
  misc_feature (1)..(1412): Ortholog of  Ceres SEQ ID NO 13595492 as cited in SEQ ID NO 51124

SEQ ID NO: 111287 - protein, 426 aa, Arabidopsis thaliana; identical to SEQ ID NO: 100048
  peptide (1)..(426): Ceres Seq. ID no. 13604159

SEQ ID NO: 111288 - protein, 416 aa, Arabidopsis thaliana; identical to SEQ ID NO: 39545
  peptide (1)..(416): Ceres Seq. ID no. 13604160

SEQ ID NO: 111289 - protein, 294 aa, Arabidopsis thaliana; identical to SEQ ID NO: 100050
  peptide (1)..(294): Ceres Seq. ID no. 13604161

SEQ ID NO: 111290 - DNA, 1047 bp, Arabidopsis thaliana; identical to SEQ ID NO: 100051
  misc_feature (1)..(1047): Ceres Seq. ID no. 13604162
  misc_feature (1)..(1047): Ortholog of  Ceres SEQ ID NO 12583421 as cited in SEQ ID NO 56410
  misc_feature (1)..(1047): Ortholog of  Ceres SEQ ID NO 15176407 as cited in SEQ ID NO 59620
  misc_feature (1)..(1047): Ortholog of  Ceres SEQ ID NO 13596876 as cited in SEQ ID NO 62696
  misc_feature (1)..(1047): Ortholog of  Ceres SEQ ID NO 13655442 as cited in SEQ ID NO 64359

SEQ ID NO: 111291 - protein, 305 aa, Arabidopsis thaliana; identical to SEQ ID NO: 100052
  peptide (1)..(305): Ceres Seq. ID no. 13604163

SEQ ID NO: 111292 - protein, 299 aa, Arabidopsis thaliana; identical to SEQ ID NO: 38301
  peptide (1)..(299): Ceres Seq. ID no. 13604164

SEQ ID NO: 111293 - protein, 297 aa, Arabidopsis thaliana; identical to SEQ ID NO: 38302
  peptide (1)..(297): Ceres Seq. ID no. 13604165

SEQ ID NO: 111294 - DNA, 703 bp, Arabidopsis thaliana; identical to SEQ ID NO: 100055
  misc_feature (1)..(703): Ceres Seq. ID no. 13604170
  misc_feature (1)..(703): Ortholog of  Ceres SEQ ID NO 12587416 as cited in SEQ ID NO 68868

SEQ ID NO: 111295 - protein, 158 aa, Arabidopsis thaliana; identical to SEQ ID NO: 42235
  peptide (1)..(158): Ceres Seq. ID no. 13604171

SEQ ID NO: 111296 - protein, 119 aa, Arabidopsis thaliana; identical to SEQ ID NO: 42236
  peptide (1)..(119): Ceres Seq. ID no. 13604172

SEQ ID NO: 111297 - DNA, 712 bp, Arabidopsis thaliana; identical to SEQ ID NO: 100058
  misc_feature (1)..(712): Ceres Seq. ID no. 13604191
  misc_feature (1)..(712): Ortholog of  Ceres SEQ ID NO 12638267 as cited in SEQ ID NO 0

SEQ ID NO: 111298 - protein, 154 aa, Arabidopsis thaliana; identical to SEQ ID NO: 100059
  peptide (1)..(154): Ceres Seq. ID no. 13604192

SEQ ID NO: 111299 - protein, 128 aa, Arabidopsis thaliana; identical to SEQ ID NO: 37024
  peptide (1)..(128): Ceres Seq. ID no. 13604193

SEQ ID NO: 111300 - DNA, 1434 bp, Arabidopsis thaliana; identical to SEQ ID NO: 100061
  misc_feature (1)..(1434): Ceres Seq. ID no. 13604209
  misc_feature (1)..(1434): Ortholog of  Ceres SEQ ID NO 15226389 as cited in SEQ ID NO 52992
  misc_feature (1)..(1434): Ortholog of  Ceres SEQ ID NO 14312152 as cited in SEQ ID NO 57197

SEQ ID NO: 111301 - protein, 471 aa, Arabidopsis thaliana; identical to SEQ ID NO: 100062
  peptide (1)..(471): Ceres Seq. ID no. 13604210

SEQ ID NO: 111302 - protein, 470 aa, Arabidopsis thaliana; identical to SEQ ID NO: 100063
  peptide (1)..(470): Ceres Seq. ID no. 13604211

SEQ ID NO: 111303 - protein, 456 aa, Arabidopsis thaliana; identical to SEQ ID NO: 38779
  peptide (1)..(456): Ceres Seq. ID no. 13604212

SEQ ID NO: 111304 - DNA, 710 bp, Arabidopsis thaliana; identical to SEQ ID NO: 100065
  misc_feature (1)..(710): Ceres Seq. ID no. 13604225
  misc_feature (1)..(710): Ortholog of  Ceres SEQ ID NO 12624943 as cited in SEQ ID NO 67802

SEQ ID NO: 111305 - protein, 201 aa, Arabidopsis thaliana; identical to SEQ ID NO: 100066
  peptide (1)..(201): Ceres Seq. ID no. 13604226

SEQ ID NO: 111306 - protein, 196 aa, Arabidopsis thaliana; identical to SEQ ID NO: 30219
  peptide (1)..(196): Ceres Seq. ID no. 13604227

SEQ ID NO: 111307 - protein, 136 aa, Arabidopsis thaliana; identical to SEQ ID NO: 30220
  peptide (1)..(136): Ceres Seq. ID no. 13604228

SEQ ID NO: 111308 - DNA, 1561 bp, Arabidopsis thaliana; identical to SEQ ID NO: 100069
  misc_feature (1)..(1561): Ceres Seq. ID no. 13604245
  misc_feature (1)..(1561): Ortholog of  Ceres SEQ ID NO 15178767 as cited in SEQ ID NO 55317

SEQ ID NO: 111309 - protein, 394 aa, Arabidopsis thaliana; identical to SEQ ID NO: 39360
  peptide (1)..(394): Ceres Seq. ID no. 13604246

SEQ ID NO: 111310 - protein, 348 aa, Arabidopsis thaliana; identical to SEQ ID NO: 39361
  peptide (1)..(348): Ceres Seq. ID no. 13604247

SEQ ID NO: 111311 - DNA, 1696 bp, Arabidopsis thaliana; identical to SEQ ID NO: 100072
  misc_feature (1)..(1696): Ceres Seq. ID no. 13604256
  misc_feature (1)..(1696): Ortholog of  Ceres SEQ ID NO 13597648 as cited in SEQ ID NO 69125

SEQ ID NO: 111312 - protein, 487 aa, Arabidopsis thaliana; identical to SEQ ID NO: 100073
  peptide (1)..(487): Ceres Seq. ID no. 13604257

SEQ ID NO: 111313 - protein, 442 aa, Arabidopsis thaliana; identical to SEQ ID NO: 25305
  peptide (1)..(442): Ceres Seq. ID no. 13604258

SEQ ID NO: 111314 - protein, 422 aa, Arabidopsis thaliana; identical to SEQ ID NO: 25306
  peptide (1)..(422): Ceres Seq. ID no. 13604259

SEQ ID NO: 111315 - DNA, 1701 bp, Arabidopsis thaliana; identical to SEQ ID NO: 100076
  misc_feature (1)..(1701): Ceres Seq. ID no. 13604264
  misc_feature (1)..(1701): Ortholog of  Ceres SEQ ID NO 13596816 as cited in SEQ ID NO 62287

SEQ ID NO: 111316 - protein, 485 aa, Arabidopsis thaliana; identical to SEQ ID NO: 100077
  peptide (1)..(485): Ceres Seq. ID no. 13604265

SEQ ID NO: 111317 - protein, 479 aa, Arabidopsis thaliana; identical to SEQ ID NO: 40548
  peptide (1)..(479): Ceres Seq. ID no. 13604266

SEQ ID NO: 111318 - protein, 470 aa, Arabidopsis thaliana; identical to SEQ ID NO: 40549
  peptide (1)..(470): Ceres Seq. ID no. 13604267

SEQ ID NO: 111319 - DNA, 1317 bp, Arabidopsis thaliana; identical to SEQ ID NO: 100080
  misc_feature (1)..(1317): Ceres Seq. ID no. 13604298
  misc_feature (1)..(1317): Ortholog of  Ceres SEQ ID NO 13581775 as cited in SEQ ID NO 51066
  misc_feature (1)..(1317): Ortholog of  Ceres SEQ ID NO 13595727 as cited in SEQ ID NO 57082
  misc_feature (1)..(1317): Ortholog of  Ceres SEQ ID NO 15171152 as cited in SEQ ID NO 60275

SEQ ID NO: 111320 - protein, 391 aa, Arabidopsis thaliana; identical to SEQ ID NO: 100081
  peptide (1)..(391): Ceres Seq. ID no. 13604299

SEQ ID NO: 111321 - protein, 332 aa, Arabidopsis thaliana; identical to SEQ ID NO: 100082
  peptide (1)..(332): Ceres Seq. ID no. 13604300

SEQ ID NO: 111322 - protein, 315 aa, Arabidopsis thaliana; identical to SEQ ID NO: 100083
  peptide (1)..(315): Ceres Seq. ID no. 13604301

SEQ ID NO: 111323 - DNA, 970 bp, Arabidopsis thaliana; identical to SEQ ID NO: 100084
  misc_feature (1)..(970): Ceres Seq. ID no. 13604302
  misc_feature (1)..(970): Ortholog of  Ceres SEQ ID NO 15226909 as cited in SEQ ID NO 61336
  misc_feature (1)..(970): Ortholog of  Ceres SEQ ID NO 15179474 as cited in SEQ ID NO 0

SEQ ID NO: 111324 - protein, 290 aa, Arabidopsis thaliana; identical to SEQ ID NO: 100085
  peptide (1)..(290): Ceres Seq. ID no. 13604303

SEQ ID NO: 111325 - protein, 285 aa, Arabidopsis thaliana; identical to SEQ ID NO: 28398
  peptide (1)..(285): Ceres Seq. ID no. 13604304

SEQ ID NO: 111326 - protein, 240 aa, Arabidopsis thaliana; identical to SEQ ID NO: 28399
  peptide (1)..(240): Ceres Seq. ID no. 13604305

SEQ ID NO: 111327 - DNA, 1289 bp, Arabidopsis thaliana; identical to SEQ ID NO: 100088
  misc_feature (1)..(1289): Ceres Seq. ID no. 13604316
  misc_feature (1)..(1289): Ortholog of  Ceres SEQ ID NO 14313147 as cited in SEQ ID NO 54166
  misc_feature (1)..(1289): Ortholog of  Ceres SEQ ID NO 13598882 as cited in SEQ ID NO 0

SEQ ID NO: 111328 - protein, 308 aa, Arabidopsis thaliana; identical to SEQ ID NO: 100089
  peptide (1)..(308): Ceres Seq. ID no. 13604317

SEQ ID NO: 111329 - protein, 287 aa, Arabidopsis thaliana; identical to SEQ ID NO: 100090
  peptide (1)..(287): Ceres Seq. ID no. 13604318

SEQ ID NO: 111330 - protein, 273 aa, Arabidopsis thaliana; identical to SEQ ID NO: 100091
  peptide (1)..(273): Ceres Seq. ID no. 13604319

SEQ ID NO: 111331 - DNA, 1293 bp, Arabidopsis thaliana; identical to SEQ ID NO: 100092
  misc_feature (1)..(1293): Ceres Seq. ID no. 13604335
  misc_feature (1)..(1293): Ortholog of  Ceres SEQ ID NO 15169045 as cited in SEQ ID NO 58372
  misc_feature (1)..(1293): Ortholog of  Ceres SEQ ID NO 13597361 as cited in SEQ ID NO 63638
  misc_feature (1)..(1293): Ortholog of  Ceres SEQ ID NO 13595945 as cited in SEQ ID NO 68157

SEQ ID NO: 111332 - protein, 376 aa, Arabidopsis thaliana; identical to SEQ ID NO: 100093
  peptide (1)..(376): Ceres Seq. ID no. 13604336

SEQ ID NO: 111333 - protein, 351 aa, Arabidopsis thaliana; identical to SEQ ID NO: 100094
  peptide (1)..(351): Ceres Seq. ID no. 13604337

SEQ ID NO: 111334 - protein, 345 aa, Arabidopsis thaliana; identical to SEQ ID NO: 100095
  peptide (1)..(345): Ceres Seq. ID no. 13604338

SEQ ID NO: 111335 - DNA, 1111 bp, Arabidopsis thaliana; identical to SEQ ID NO: 100096
  misc_feature (1)..(1111): Ceres Seq. ID no. 13604343
  misc_feature (1)..(1111): Ortholog of  Ceres SEQ ID NO 12633565 as cited in SEQ ID NO 1190
  misc_feature (1)..(1111): Ortholog of  Ceres SEQ ID NO 15171390 as cited in SEQ ID NO 51650
  misc_feature (1)..(1111): Ortholog of  Ceres SEQ ID NO 13594845 as cited in SEQ ID NO 51940

SEQ ID NO: 111336 - protein, 258 aa, Arabidopsis thaliana; identical to SEQ ID NO: 100097
  peptide (1)..(258): Ceres Seq. ID no. 13604344

SEQ ID NO: 111337 - protein, 206 aa, Arabidopsis thaliana; identical to SEQ ID NO: 100098
  peptide (1)..(206): Ceres Seq. ID no. 13604345

SEQ ID NO: 111338 - protein, 171 aa, Arabidopsis thaliana; identical to SEQ ID NO: 100099
  peptide (1)..(171): Ceres Seq. ID no. 13604346

SEQ ID NO: 111339 - DNA, 1206 bp, Arabidopsis thaliana; identical to SEQ ID NO: 100100
  misc_feature (1)..(1206): Ceres Seq. ID no. 13604347
  misc_feature (1)..(1206): Ortholog of  Ceres SEQ ID NO 14311074 as cited in SEQ ID NO 53253

SEQ ID NO: 111340 - protein, 279 aa, Arabidopsis thaliana; identical to SEQ ID NO: 100101
  peptide (1)..(279): Ceres Seq. ID no. 13604348

SEQ ID NO: 111341 - DNA, 1056 bp, Arabidopsis thaliana; identical to SEQ ID NO: 100102
  misc_feature (1)..(1056): Ceres Seq. ID no. 13604353
  misc_feature (1)..(1056): Ortholog of  Ceres SEQ ID NO 14307111 as cited in SEQ ID NO 54586
  misc_feature (1)..(1056): Ortholog of  Ceres SEQ ID NO 13655720 as cited in SEQ ID NO 63418
  misc_feature (1)..(1056): Ortholog of  Ceres SEQ ID NO 15176165 as cited in SEQ ID NO 0

SEQ ID NO: 111342 - protein, 327 aa, Arabidopsis thaliana; identical to SEQ ID NO: 100103
  peptide (1)..(327): Ceres Seq. ID no. 13604354

SEQ ID NO: 111343 - protein, 326 aa, Arabidopsis thaliana; identical to SEQ ID NO: 100104
  peptide (1)..(326): Ceres Seq. ID no. 13604355

SEQ ID NO: 111344 - protein, 286 aa, Arabidopsis thaliana; identical to SEQ ID NO: 100105
  peptide (1)..(286): Ceres Seq. ID no. 13604356

SEQ ID NO: 111345 - DNA, 1373 bp, Arabidopsis thaliana; identical to SEQ ID NO: 100106
  misc_feature (1)..(1373): Ceres Seq. ID no. 13604357
  misc_feature (1)..(1373): Ortholog of  Ceres SEQ ID NO 15177328 as cited in SEQ ID NO 52523
  misc_feature (1)..(1373): Ortholog of  Ceres SEQ ID NO 13655881 as cited in SEQ ID NO 64426

SEQ ID NO: 111346 - protein, 378 aa, Arabidopsis thaliana; identical to SEQ ID NO: 25789
  peptide (1)..(378): Ceres Seq. ID no. 13604358

SEQ ID NO: 111347 - protein, 374 aa, Arabidopsis thaliana; identical to SEQ ID NO: 25790
  peptide (1)..(374): Ceres Seq. ID no. 13604359

SEQ ID NO: 111348 - protein, 342 aa, Arabidopsis thaliana; identical to SEQ ID NO: 25791
  peptide (1)..(342): Ceres Seq. ID no. 13604360

SEQ ID NO: 111349 - DNA, 1422 bp, Arabidopsis thaliana; identical to SEQ ID NO: 100110
  misc_feature (1)..(1422): Ceres Seq. ID no. 13604380
  misc_feature (1)..(1422): Ortholog of  Ceres SEQ ID NO 15176596 as cited in SEQ ID NO 55168
  misc_feature (1)..(1422): Ortholog of  Ceres SEQ ID NO 14301576 as cited in SEQ ID NO 62362

SEQ ID NO: 111350 - protein, 360 aa, Arabidopsis thaliana; identical to SEQ ID NO: 41459
  peptide (1)..(360): Ceres Seq. ID no. 13604381

SEQ ID NO: 111351 - DNA, 1781 bp, Arabidopsis thaliana; identical to SEQ ID NO: 100112
  misc_feature (1)..(1781): Ceres Seq. ID no. 13604382
  misc_feature (1)..(1781): Ortholog of  Ceres SEQ ID NO 13659971 as cited in SEQ ID NO 67565
  misc_feature (1)..(1781): Ortholog of  Ceres SEQ ID NO 13500385 as cited in SEQ ID NO 67583

SEQ ID NO: 111352 - protein, 523 aa, Arabidopsis thaliana; identical to SEQ ID NO: 77847
  peptide (1)..(523): Ceres Seq. ID no. 13604383

SEQ ID NO: 111353 - protein, 426 aa, Arabidopsis thaliana; identical to SEQ ID NO: 77848
  peptide (1)..(426): Ceres Seq. ID no. 13604384

SEQ ID NO: 111354 - protein, 384 aa, Arabidopsis thaliana; identical to SEQ ID NO: 100115
  peptide (1)..(384): Ceres Seq. ID no. 13604385

SEQ ID NO: 111355 - DNA, 810 bp, Arabidopsis thaliana; identical to SEQ ID NO: 100116
  misc_feature (1)..(810): Ceres Seq. ID no. 13604386
  misc_feature (1)..(810): Ortholog of  Ceres SEQ ID NO 12556792 as cited in SEQ ID NO 37
  misc_feature (1)..(810): Ortholog of  Ceres SEQ ID NO 13594143 as cited in SEQ ID NO 58945
  misc_feature (1)..(810): Ortholog of  Ceres SEQ ID NO 15179171 as cited in SEQ ID NO 0

SEQ ID NO: 111356 - protein, 184 aa, Arabidopsis thaliana; identical to SEQ ID NO: 39710
  peptide (1)..(184): Ceres Seq. ID no. 13604387

SEQ ID NO: 111357 - protein, 105 aa, Arabidopsis thaliana; identical to SEQ ID NO: 39711
  peptide (1)..(105): Ceres Seq. ID no. 13604388

SEQ ID NO: 111358 - DNA, 1581 bp, Arabidopsis thaliana; identical to SEQ ID NO: 100119
  misc_feature (1)..(1581): Ceres Seq. ID no. 13604401
  misc_feature (1)..(1581): Ortholog of  Ceres SEQ ID NO 15176273 as cited in SEQ ID NO 58534

SEQ ID NO: 111359 - protein, 502 aa, Arabidopsis thaliana; identical to SEQ ID NO: 100120
  peptide (1)..(502): Ceres Seq. ID no. 13604402

SEQ ID NO: 111360 - protein, 455 aa, Arabidopsis thaliana; identical to SEQ ID NO: 100121
  peptide (1)..(455): Ceres Seq. ID no. 13604403

SEQ ID NO: 111361 - protein, 430 aa, Arabidopsis thaliana; identical to SEQ ID NO: 100122
  peptide (1)..(430): Ceres Seq. ID no. 13604404

SEQ ID NO: 111362 - DNA, 799 bp, Arabidopsis thaliana; identical to SEQ ID NO: 100123
  misc_feature (1)..(799): Ceres Seq. ID no. 13604407
  misc_feature (1)..(799): Ortholog of  Ceres SEQ ID NO 13596325 as cited in SEQ ID NO 67987

SEQ ID NO: 111363 - protein, 204 aa, Arabidopsis thaliana; identical to SEQ ID NO: 21025
  peptide (1)..(204): Ceres Seq. ID no. 13604408

SEQ ID NO: 111364 - protein, 169 aa, Arabidopsis thaliana; identical to SEQ ID NO: 21026
  peptide (1)..(169): Ceres Seq. ID no. 13604409

SEQ ID NO: 111365 - protein, 153 aa, Arabidopsis thaliana; identical to SEQ ID NO: 21027
  peptide (1)..(153): Ceres Seq. ID no. 13604410

SEQ ID NO: 111366 - DNA, 2441 bp, Arabidopsis thaliana; identical to SEQ ID NO: 100127
  misc_feature (1)..(2441): Ceres Seq. ID no. 13604427
  misc_feature (1)..(2441): Ortholog of  Ceres SEQ ID NO 14302836 as cited in SEQ ID NO 65013

SEQ ID NO: 111367 - protein, 511 aa, Arabidopsis thaliana; identical to SEQ ID NO: 100128
  peptide (1)..(511): Ceres Seq. ID no. 13604428

SEQ ID NO: 111368 - protein, 494 aa, Arabidopsis thaliana; identical to SEQ ID NO: 100129
  peptide (1)..(494): Ceres Seq. ID no. 13604429

SEQ ID NO: 111369 - protein, 471 aa, Arabidopsis thaliana; identical to SEQ ID NO: 100130
  peptide (1)..(471): Ceres Seq. ID no. 13604430

SEQ ID NO: 111370 - DNA, 1034 bp, Arabidopsis thaliana; identical to SEQ ID NO: 100131
  misc_feature (1)..(1034): Ceres Seq. ID no. 13604435
  misc_feature (1)..(1034): Ortholog of  Ceres SEQ ID NO 13503500 as cited in SEQ ID NO 68001
  misc_feature (1)..(1034): Ortholog of  Ceres SEQ ID NO 15174327 as cited in SEQ ID NO 0

SEQ ID NO: 111371 - protein, 285 aa, Arabidopsis thaliana; identical to SEQ ID NO: 100132
  peptide (1)..(285): Ceres Seq. ID no. 13604436

SEQ ID NO: 111372 - protein, 264 aa, Arabidopsis thaliana; identical to SEQ ID NO: 100133
  peptide (1)..(264): Ceres Seq. ID no. 13604437

SEQ ID NO: 111373 - DNA, 1178 bp, Arabidopsis thaliana; identical to SEQ ID NO: 100134
  misc_feature (1)..(1178): Ceres Seq. ID no. 13604438
  misc_feature (1)..(1178): Ortholog of  Ceres SEQ ID NO 13594482 as cited in SEQ ID NO 51285
  misc_feature (1)..(1178): Ortholog of  Ceres SEQ ID NO 13655381 as cited in SEQ ID NO 63359
  misc_feature (1)..(1178): Ortholog of  Ceres SEQ ID NO 12617583 as cited in SEQ ID NO 64897

SEQ ID NO: 111374 - protein, 353 aa, Arabidopsis thaliana; identical to SEQ ID NO: 30208
  peptide (1)..(353): Ceres Seq. ID no. 13604439

SEQ ID NO: 111375 - protein, 343 aa, Arabidopsis thaliana; identical to SEQ ID NO: 30209
  peptide (1)..(343): Ceres Seq. ID no. 13604440

SEQ ID NO: 111376 - protein, 285 aa, Arabidopsis thaliana; identical to SEQ ID NO: 30210
  peptide (1)..(285): Ceres Seq. ID no. 13604441

SEQ ID NO: 111377 - DNA, 1467 bp, Arabidopsis thaliana; identical to SEQ ID NO: 100138
  misc_feature (1)..(1467): Ceres Seq. ID no. 13604445
  misc_feature (1)..(1467): Ortholog of  Ceres SEQ ID NO 15227026 as cited in SEQ ID NO 52193
  misc_feature (1)..(1467): Ortholog of  Ceres SEQ ID NO 13595454 as cited in SEQ ID NO 56502

SEQ ID NO: 111378 - protein, 337 aa, Arabidopsis thaliana; identical to SEQ ID NO: 100139
  peptide (1)..(337): Ceres Seq. ID no. 13604446

SEQ ID NO: 111379 - protein, 332 aa, Arabidopsis thaliana; identical to SEQ ID NO: 100140
  peptide (1)..(332): Ceres Seq. ID no. 13604447

SEQ ID NO: 111380 - protein, 249 aa, Arabidopsis thaliana; identical to SEQ ID NO: 100141
  peptide (1)..(249): Ceres Seq. ID no. 13604448

SEQ ID NO: 111381 - DNA, 621 bp, Arabidopsis thaliana; identical to SEQ ID NO: 100142
  misc_feature (1)..(621): Ceres Seq. ID no. 13604449
  misc_feature (1)..(621): Ortholog of  Ceres SEQ ID NO 15180374 as cited in SEQ ID NO 0

SEQ ID NO: 111382 - protein, 181 aa, Arabidopsis thaliana; identical to SEQ ID NO: 100143
  peptide (1)..(181): Ceres Seq. ID no. 13604450

SEQ ID NO: 111383 - protein, 165 aa, Arabidopsis thaliana; identical to SEQ ID NO: 25920
  peptide (1)..(165): Ceres Seq. ID no. 13604451

SEQ ID NO: 111384 - protein, 159 aa, Arabidopsis thaliana; identical to SEQ ID NO: 25921
  peptide (1)..(159): Ceres Seq. ID no. 13604452

SEQ ID NO: 111385 - DNA, 1494 bp, Arabidopsis thaliana; identical to SEQ ID NO: 100146
  misc_feature (1)..(1494): Ceres Seq. ID no. 13604457
  misc_feature (1)..(1494): Ortholog of  Ceres SEQ ID NO 15177854 as cited in SEQ ID NO 51851
  misc_feature (1)..(1494): Ortholog of  Ceres SEQ ID NO 15177087 as cited in SEQ ID NO 51932
  misc_feature (1)..(1494): Ortholog of  Ceres SEQ ID NO 13662937 as cited in SEQ ID NO 64415
  misc_feature (1)..(1494): Ortholog of  Ceres SEQ ID NO 13595984 as cited in SEQ ID NO 68340
  misc_feature (1)..(1494): Ortholog of  Ceres SEQ ID NO 12635014 as cited in SEQ ID NO 0

SEQ ID NO: 111386 - protein, 269 aa, Arabidopsis thaliana; identical to SEQ ID NO: 40649
  peptide (1)..(269): Ceres Seq. ID no. 13604458

SEQ ID NO: 111387 - protein, 259 aa, Arabidopsis thaliana; identical to SEQ ID NO: 40650
  peptide (1)..(259): Ceres Seq. ID no. 13604459

SEQ ID NO: 111388 - protein, 255 aa, Arabidopsis thaliana; identical to SEQ ID NO: 40651
  peptide (1)..(255): Ceres Seq. ID no. 13604460

SEQ ID NO: 111389 - DNA, 1073 bp, Arabidopsis thaliana; identical to SEQ ID NO: 100150
  misc_feature (1)..(1073): Ceres Seq. ID no. 13604467
  misc_feature (1)..(1073): Ortholog of  Ceres SEQ ID NO 13596609 as cited in SEQ ID NO 63070
  misc_feature (1)..(1073): Ortholog of  Ceres SEQ ID NO 12616895 as cited in SEQ ID NO 63909
  misc_feature (1)..(1073): Ortholog of  Ceres SEQ ID NO 13598574 as cited in SEQ ID NO 69083

SEQ ID NO: 111390 - protein, 271 aa, Arabidopsis thaliana; identical to SEQ ID NO: 100151
  peptide (1)..(271): Ceres Seq. ID no. 13604468

SEQ ID NO: 111391 - protein, 264 aa, Arabidopsis thaliana; identical to SEQ ID NO: 100152
  peptide (1)..(264): Ceres Seq. ID no. 13604469

SEQ ID NO: 111392 - protein, 255 aa, Arabidopsis thaliana; identical to SEQ ID NO: 100153
  peptide (1)..(255): Ceres Seq. ID no. 13604470

SEQ ID NO: 111393 - DNA, 847 bp, Arabidopsis thaliana; identical to SEQ ID NO: 100154
  misc_feature (1)..(847): Ceres Seq. ID no. 13604471
  misc_feature (1)..(847): Ortholog of  Ceres SEQ ID NO 15173873 as cited in SEQ ID NO 62620
  misc_feature (1)..(847): Ortholog of  Ceres SEQ ID NO 13655610 as cited in SEQ ID NO 64148
  misc_feature (1)..(847): Ortholog of  Ceres SEQ ID NO 14302675 as cited in SEQ ID NO 0

SEQ ID NO: 111394 - protein, 243 aa, Arabidopsis thaliana; identical to SEQ ID NO: 25771
  peptide (1)..(243): Ceres Seq. ID no. 13604472

SEQ ID NO: 111395 - protein, 233 aa, Arabidopsis thaliana; identical to SEQ ID NO: 25772
  peptide (1)..(233): Ceres Seq. ID no. 13604473

SEQ ID NO: 111396 - protein, 206 aa, Arabidopsis thaliana; identical to SEQ ID NO: 25773
  peptide (1)..(206): Ceres Seq. ID no. 13604474

SEQ ID NO: 111397 - DNA, 1887 bp, Arabidopsis thaliana; identical to SEQ ID NO: 100158
  misc_feature (1)..(1887): Ceres Seq. ID no. 13604475
  misc_feature (1)..(1887): Ortholog of  Ceres SEQ ID NO 14311191 as cited in SEQ ID NO 52591

SEQ ID NO: 111398 - protein, 486 aa, Arabidopsis thaliana; identical to SEQ ID NO: 50442
  peptide (1)..(486): Ceres Seq. ID no. 13604476

SEQ ID NO: 111399 - protein, 379 aa, Arabidopsis thaliana; identical to SEQ ID NO: 50443
  peptide (1)..(379): Ceres Seq. ID no. 13604477

SEQ ID NO: 111400 - protein, 377 aa, Arabidopsis thaliana; identical to SEQ ID NO: 100161
  peptide (1)..(377): Ceres Seq. ID no. 13604478

SEQ ID NO: 111401 - DNA, 1399 bp, Arabidopsis thaliana; identical to SEQ ID NO: 100162
  misc_feature (1)..(1399): Ceres Seq. ID no. 13604479
  misc_feature (1)..(1399): Ortholog of  Ceres SEQ ID NO 15224803 as cited in SEQ ID NO 56572
  misc_feature (1)..(1399): Ortholog of  Ceres SEQ ID NO 14308598 as cited in SEQ ID NO 60416
  misc_feature (1)..(1399): Ortholog of  Ceres SEQ ID NO 13502952 as cited in SEQ ID NO 62271
  misc_feature (1)..(1399): Ortholog of  Ceres SEQ ID NO 13502973 as cited in SEQ ID NO 68052
  misc_feature (1)..(1399): Ortholog of  Ceres SEQ ID NO 13596000 as cited in SEQ ID NO 68188
  misc_feature (1)..(1399): Ortholog of  Ceres SEQ ID NO 15179420 as cited in SEQ ID NO 0

SEQ ID NO: 111402 - protein, 376 aa, Arabidopsis thaliana; identical to SEQ ID NO: 100163
  peptide (1)..(376): Ceres Seq. ID no. 13604480

SEQ ID NO: 111403 - DNA, 1336 bp, Arabidopsis thaliana; identical to SEQ ID NO: 100164
  misc_feature (1)..(1336): Ceres Seq. ID no. 13604493
  misc_feature (1)..(1336): Ortholog of  Ceres SEQ ID NO 12610930 as cited in SEQ ID NO 55892

SEQ ID NO: 111404 - protein, 356 aa, Arabidopsis thaliana; identical to SEQ ID NO: 100165
  peptide (1)..(356): Ceres Seq. ID no. 13604494

SEQ ID NO: 111405 - protein, 354 aa, Arabidopsis thaliana; identical to SEQ ID NO: 100166
  peptide (1)..(354): Ceres Seq. ID no. 13604495

SEQ ID NO: 111406 - protein, 350 aa, Arabidopsis thaliana; identical to SEQ ID NO: 100167
  peptide (1)..(350): Ceres Seq. ID no. 13604496

SEQ ID NO: 111407 - DNA, 1944 bp, Arabidopsis thaliana; identical to SEQ ID NO: 100168
  misc_feature (1)..(1944): Ceres Seq. ID no. 13604501
  misc_feature (1)..(1944): Ortholog of  Ceres SEQ ID NO 14306420 as cited in SEQ ID NO 53854

SEQ ID NO: 111408 - protein, 546 aa, Arabidopsis thaliana; identical to SEQ ID NO: 100169
  peptide (1)..(546): Ceres Seq. ID no. 13604502

SEQ ID NO: 111409 - protein, 525 aa, Arabidopsis thaliana; identical to SEQ ID NO: 100170
  peptide (1)..(525): Ceres Seq. ID no. 13604503

SEQ ID NO: 111410 - protein, 395 aa, Arabidopsis thaliana; identical to SEQ ID NO: 100171
  peptide (1)..(395): Ceres Seq. ID no. 13604504

SEQ ID NO: 111411 - DNA, 1644 bp, Arabidopsis thaliana; identical to SEQ ID NO: 100172
  misc_feature (1)..(1644): Ceres Seq. ID no. 13604533
  misc_feature (1)..(1644): Ortholog of  Ceres SEQ ID NO 13663419 as cited in SEQ ID NO 66561

SEQ ID NO: 111412 - protein, 464 aa, Arabidopsis thaliana; identical to SEQ ID NO: 100173
  peptide (1)..(464): Ceres Seq. ID no. 13604534

SEQ ID NO: 111413 - protein, 392 aa, Arabidopsis thaliana; identical to SEQ ID NO: 100174
  peptide (1)..(392): Ceres Seq. ID no. 13604535

SEQ ID NO: 111414 - protein, 315 aa, Arabidopsis thaliana; identical to SEQ ID NO: 100175
  peptide (1)..(315): Ceres Seq. ID no. 13604536

SEQ ID NO: 111415 - DNA, 3498 bp, Arabidopsis thaliana; identical to SEQ ID NO: 100176
  misc_feature (1)..(3498): Ceres Seq. ID no. 13604537
  misc_feature (1)..(3498): Ortholog of  Ceres SEQ ID NO 14311156 as cited in SEQ ID NO 54767
  misc_feature (1)..(3498): Ortholog of  Ceres SEQ ID NO 14313220 as cited in SEQ ID NO 66007
  misc_feature (1)..(3498): Ortholog of  Ceres SEQ ID NO 13658778 as cited in SEQ ID NO 66511

SEQ ID NO: 111416 - protein, 1069 aa, Arabidopsis thaliana; identical to SEQ ID NO: 100177
  peptide (1)..(1069): Ceres Seq. ID no. 13604538

SEQ ID NO: 111417 - protein, 881 aa, Arabidopsis thaliana; identical to SEQ ID NO: 100178
  peptide (1)..(881): Ceres Seq. ID no. 13604539

SEQ ID NO: 111418 - protein, 861 aa, Arabidopsis thaliana; identical to SEQ ID NO: 100179
  peptide (1)..(861): Ceres Seq. ID no. 13604540

SEQ ID NO: 111419 - DNA, 1099 bp, Arabidopsis thaliana; identical to SEQ ID NO: 100180
  misc_feature (1)..(1099): Ceres Seq. ID no. 13604547
  misc_feature (1)..(1099): Ortholog of  Ceres SEQ ID NO 12474685 as cited in SEQ ID NO 88
  misc_feature (1)..(1099): Ortholog of  Ceres SEQ ID NO 13638574 as cited in SEQ ID NO 51223
  misc_feature (1)..(1099): Ortholog of  Ceres SEQ ID NO 12610790 as cited in SEQ ID NO 56123
  misc_feature (1)..(1099): Ortholog of  Ceres SEQ ID NO 13655636 as cited in SEQ ID NO 63519
  misc_feature (1)..(1099): Ortholog of  Ceres SEQ ID NO 13655896 as cited in SEQ ID NO 64970

SEQ ID NO: 111420 - protein, 330 aa, Arabidopsis thaliana; identical to SEQ ID NO: 100181
  peptide (1)..(330): Ceres Seq. ID no. 13604548

SEQ ID NO: 111421 - protein, 322 aa, Arabidopsis thaliana; identical to SEQ ID NO: 100182
  peptide (1)..(322): Ceres Seq. ID no. 13604549

SEQ ID NO: 111422 - protein, 310 aa, Arabidopsis thaliana; identical to SEQ ID NO: 100183
  peptide (1)..(310): Ceres Seq. ID no. 13604550

SEQ ID NO: 111423 - DNA, 910 bp, Arabidopsis thaliana; identical to SEQ ID NO: 100184
  misc_feature (1)..(910): Ceres Seq. ID no. 13604551
  misc_feature (1)..(910): Ortholog of  Ceres SEQ ID NO 13595568 as cited in SEQ ID NO 56764

SEQ ID NO: 111424 - protein, 285 aa, Arabidopsis thaliana; identical to SEQ ID NO: 100185
  peptide (1)..(285): Ceres Seq. ID no. 13604552

SEQ ID NO: 111425 - protein, 263 aa, Arabidopsis thaliana; identical to SEQ ID NO: 100186
  peptide (1)..(263): Ceres Seq. ID no. 13604553

SEQ ID NO: 111426 - protein, 255 aa, Arabidopsis thaliana; identical to SEQ ID NO: 100187
  peptide (1)..(255): Ceres Seq. ID no. 13604554

SEQ ID NO: 111427 - DNA, 2060 bp, Arabidopsis thaliana; identical to SEQ ID NO: 100188
  misc_feature (1)..(2060): Ceres Seq. ID no. 13604569
  misc_feature (1)..(2060): Ortholog of  Ceres SEQ ID NO 12586556 as cited in SEQ ID NO 64667
  misc_feature (1)..(2060): Ortholog of  Ceres SEQ ID NO 13660894 as cited in SEQ ID NO 67475

SEQ ID NO: 111428 - protein, 656 aa, Arabidopsis thaliana; identical to SEQ ID NO: 100189
  peptide (1)..(656): Ceres Seq. ID no. 13604570

SEQ ID NO: 111429 - protein, 607 aa, Arabidopsis thaliana; identical to SEQ ID NO: 100190
  peptide (1)..(607): Ceres Seq. ID no. 13604571

SEQ ID NO: 111430 - protein, 580 aa, Arabidopsis thaliana; identical to SEQ ID NO: 100191
  peptide (1)..(580): Ceres Seq. ID no. 13604572

SEQ ID NO: 111431 - DNA, 1990 bp, Arabidopsis thaliana; identical to SEQ ID NO: 100192
  misc_feature (1)..(1990): Ceres Seq. ID no. 13604573
  misc_feature (1)..(1990): Ortholog of  Ceres SEQ ID NO 13585587 as cited in SEQ ID NO 65515

SEQ ID NO: 111432 - protein, 553 aa, Arabidopsis thaliana; identical to SEQ ID NO: 35010
  peptide (1)..(553): Ceres Seq. ID no. 13604574

SEQ ID NO: 111433 - protein, 517 aa, Arabidopsis thaliana; identical to SEQ ID NO: 35011
  peptide (1)..(517): Ceres Seq. ID no. 13604575

SEQ ID NO: 111434 - protein, 415 aa, Arabidopsis thaliana; identical to SEQ ID NO: 35012
  peptide (1)..(415): Ceres Seq. ID no. 13604576

SEQ ID NO: 111435 - DNA, 1762 bp, Arabidopsis thaliana; identical to SEQ ID NO: 100196
  misc_feature (1)..(1762): Ceres Seq. ID no. 13604577
  misc_feature (1)..(1762): Ortholog of  Ceres SEQ ID NO 14316459 as cited in SEQ ID NO 57754

SEQ ID NO: 111436 - protein, 307 aa, Arabidopsis thaliana; identical to SEQ ID NO: 100197
  peptide (1)..(307): Ceres Seq. ID no. 13604578

SEQ ID NO: 111437 - protein, 285 aa, Arabidopsis thaliana; identical to SEQ ID NO: 100198
  peptide (1)..(285): Ceres Seq. ID no. 13604579

SEQ ID NO: 111438 - DNA, 998 bp, Arabidopsis thaliana; identical to SEQ ID NO: 100199
  misc_feature (1)..(998): Ceres Seq. ID no. 13604580
  misc_feature (1)..(998): Ortholog of  Ceres SEQ ID NO 13595158 as cited in SEQ ID NO 51008
  misc_feature (1)..(998): Ortholog of  Ceres SEQ ID NO 13581682 as cited in SEQ ID NO 57913
  misc_feature (1)..(998): Ortholog of  Ceres SEQ ID NO 14304144 as cited in SEQ ID NO 59152
  misc_feature (1)..(998): Ortholog of  Ceres SEQ ID NO 13662050 as cited in SEQ ID NO 61580
  misc_feature (1)..(998): Ortholog of  Ceres SEQ ID NO 14309388 as cited in SEQ ID NO 0

SEQ ID NO: 111439 - protein, 166 aa, Arabidopsis thaliana; identical to SEQ ID NO: 25098
  peptide (1)..(166): Ceres Seq. ID no. 13604581

SEQ ID NO: 111440 - protein, 134 aa, Arabidopsis thaliana; identical to SEQ ID NO: 25099
  peptide (1)..(134): Ceres Seq. ID no. 13604582

SEQ ID NO: 111441 - protein, 95 aa, Arabidopsis thaliana; identical to SEQ ID NO: 44771
  peptide (1)..(95): Ceres Seq. ID no. 13604583

SEQ ID NO: 111442 - DNA, 1143 bp, Arabidopsis thaliana; identical to SEQ ID NO: 100203
  misc_feature (1)..(1143): Ceres Seq. ID no. 13604584
  misc_feature (1)..(1143): Ortholog of  Ceres SEQ ID NO 14308168 as cited in SEQ ID NO 59069

SEQ ID NO: 111443 - protein, 330 aa, Arabidopsis thaliana; identical to SEQ ID NO: 25743
  peptide (1)..(330): Ceres Seq. ID no. 13604585

SEQ ID NO: 111444 - protein, 294 aa, Arabidopsis thaliana; identical to SEQ ID NO: 25744
  peptide (1)..(294): Ceres Seq. ID no. 13604586

SEQ ID NO: 111445 - DNA, 1024 bp, Arabidopsis thaliana; identical to SEQ ID NO: 100206
  misc_feature (1)..(1024): Ceres Seq. ID no. 13604587
  misc_feature (1)..(1024): Ortholog of  Ceres SEQ ID NO 15168868 as cited in SEQ ID NO 58303

SEQ ID NO: 111446 - protein, 232 aa, Arabidopsis thaliana; identical to SEQ ID NO: 29812
  peptide (1)..(232): Ceres Seq. ID no. 13604588

SEQ ID NO: 111447 - protein, 222 aa, Arabidopsis thaliana; identical to SEQ ID NO: 29813
  peptide (1)..(222): Ceres Seq. ID no. 13604589

SEQ ID NO: 111448 - protein, 207 aa, Arabidopsis thaliana; identical to SEQ ID NO: 29814
  peptide (1)..(207): Ceres Seq. ID no. 13604590

SEQ ID NO: 111449 - DNA, 593 bp, Arabidopsis thaliana; identical to SEQ ID NO: 100210
  misc_feature (1)..(593): Ceres Seq. ID no. 13604591
  misc_feature (1)..(593): Ortholog of  Ceres SEQ ID NO 15177455 as cited in SEQ ID NO 0

SEQ ID NO: 111450 - protein, 161 aa, Arabidopsis thaliana; identical to SEQ ID NO: 100211
  peptide (1)..(161): Ceres Seq. ID no. 13604592

SEQ ID NO: 111451 - DNA, 1342 bp, Arabidopsis thaliana; identical to SEQ ID NO: 100212
  misc_feature (1)..(1342): Ceres Seq. ID no. 13604600
  misc_feature (1)..(1342): Ortholog of  Ceres SEQ ID NO 14311505 as cited in SEQ ID NO 51412
  misc_feature (1)..(1342): Ortholog of  Ceres SEQ ID NO 13597462 as cited in SEQ ID NO 65069

SEQ ID NO: 111452 - protein, 345 aa, Arabidopsis thaliana; identical to SEQ ID NO: 100213
  peptide (1)..(345): Ceres Seq. ID no. 13604601

SEQ ID NO: 111453 - protein, 311 aa, Arabidopsis thaliana; identical to SEQ ID NO: 100214
  peptide (1)..(311): Ceres Seq. ID no. 13604602

SEQ ID NO: 111454 - protein, 260 aa, Arabidopsis thaliana; identical to SEQ ID NO: 100215
  peptide (1)..(260): Ceres Seq. ID no. 13604603

SEQ ID NO: 111455 - DNA, 953 bp, Arabidopsis thaliana; identical to SEQ ID NO: 100216
  misc_feature (1)..(953): Ceres Seq. ID no. 13604608
  misc_feature (1)..(953): Ortholog of  Ceres SEQ ID NO 13594925 as cited in SEQ ID NO 55775
  misc_feature (1)..(953): Ortholog of  Ceres SEQ ID NO 12637705 as cited in SEQ ID NO 0

SEQ ID NO: 111456 - protein, 252 aa, Arabidopsis thaliana; identical to SEQ ID NO: 100217
  peptide (1)..(252): Ceres Seq. ID no. 13604609

SEQ ID NO: 111457 - protein, 216 aa, Arabidopsis thaliana; identical to SEQ ID NO: 100218
  peptide (1)..(216): Ceres Seq. ID no. 13604610

SEQ ID NO: 111458 - protein, 164 aa, Arabidopsis thaliana; identical to SEQ ID NO: 100219
  peptide (1)..(164): Ceres Seq. ID no. 13604611

SEQ ID NO: 111459 - DNA, 2290 bp, Arabidopsis thaliana; identical to SEQ ID NO: 100220
  misc_feature (1)..(2290): Ceres Seq. ID no. 13604637
  misc_feature (1)..(2290): Ortholog of  Ceres SEQ ID NO 13586013 as cited in SEQ ID NO 1182

SEQ ID NO: 111460 - protein, 717 aa, Arabidopsis thaliana; identical to SEQ ID NO: 100221
  peptide (1)..(717): Ceres Seq. ID no. 13604638

SEQ ID NO: 111461 - protein, 685 aa, Arabidopsis thaliana; identical to SEQ ID NO: 100222
  peptide (1)..(685): Ceres Seq. ID no. 13604639

SEQ ID NO: 111462 - protein, 616 aa, Arabidopsis thaliana; identical to SEQ ID NO: 100223
  peptide (1)..(616): Ceres Seq. ID no. 13604640

SEQ ID NO: 111463 - DNA, 2981 bp, Arabidopsis thaliana; identical to SEQ ID NO: 100224
  misc_feature (1)..(2981): Ceres Seq. ID no. 13604656
  misc_feature (1)..(2981): Ortholog of  Ceres SEQ ID NO 13657677 as cited in SEQ ID NO 66119

SEQ ID NO: 111464 - protein, 558 aa, Arabidopsis thaliana; identical to SEQ ID NO: 100225
  peptide (1)..(558): Ceres Seq. ID no. 13604657

SEQ ID NO: 111465 - protein, 523 aa, Arabidopsis thaliana; identical to SEQ ID NO: 100226
  peptide (1)..(523): Ceres Seq. ID no. 13604658

SEQ ID NO: 111466 - protein, 513 aa, Arabidopsis thaliana; identical to SEQ ID NO: 100227
  peptide (1)..(513): Ceres Seq. ID no. 13604659

SEQ ID NO: 111467 - DNA, 2526 bp, Arabidopsis thaliana; identical to SEQ ID NO: 100228
  misc_feature (1)..(2526): Ceres Seq. ID no. 13604660
  misc_feature (1)..(2526): Ortholog of  Ceres SEQ ID NO 14307904 as cited in SEQ ID NO 66440
  misc_feature (1)..(2526): Ortholog of  Ceres SEQ ID NO 13659971 as cited in SEQ ID NO 67565
  misc_feature (1)..(2526): Ortholog of  Ceres SEQ ID NO 13500385 as cited in SEQ ID NO 67583

SEQ ID NO: 111468 - protein, 610 aa, Arabidopsis thaliana; identical to SEQ ID NO: 100229
  peptide (1)..(610): Ceres Seq. ID no. 13604661

SEQ ID NO: 111469 - protein, 590 aa, Arabidopsis thaliana; identical to SEQ ID NO: 100230
  peptide (1)..(590): Ceres Seq. ID no. 13604662

SEQ ID NO: 111470 - protein, 578 aa, Arabidopsis thaliana; identical to SEQ ID NO: 100231
  peptide (1)..(578): Ceres Seq. ID no. 13604663

SEQ ID NO: 111471 - DNA, 1937 bp, Arabidopsis thaliana; identical to SEQ ID NO: 100232
  misc_feature (1)..(1937): Ceres Seq. ID no. 13604664
  misc_feature (1)..(1937): Ortholog of  Ceres SEQ ID NO 13594037 as cited in SEQ ID NO 55666
  misc_feature (1)..(1937): Ortholog of  Ceres SEQ ID NO 13657707 as cited in SEQ ID NO 66407

SEQ ID NO: 111472 - protein, 564 aa, Arabidopsis thaliana; identical to SEQ ID NO: 100233
  peptide (1)..(564): Ceres Seq. ID no. 13604665

SEQ ID NO: 111473 - protein, 441 aa, Arabidopsis thaliana; identical to SEQ ID NO: 100234
  peptide (1)..(441): Ceres Seq. ID no. 13604666

SEQ ID NO: 111474 - protein, 433 aa, Arabidopsis thaliana; identical to SEQ ID NO: 100235
  peptide (1)..(433): Ceres Seq. ID no. 13604667

SEQ ID NO: 111475 - DNA, 1875 bp, Arabidopsis thaliana; identical to SEQ ID NO: 100236
  misc_feature (1)..(1875): Ceres Seq. ID no. 13604668
  misc_feature (1)..(1875): Ortholog of  Ceres SEQ ID NO 14311131 as cited in SEQ ID NO 53729
  misc_feature (1)..(1875): Ortholog of  Ceres SEQ ID NO 13594037 as cited in SEQ ID NO 55666
  misc_feature (1)..(1875): Ortholog of  Ceres SEQ ID NO 13657707 as cited in SEQ ID NO 66407

SEQ ID NO: 111476 - protein, 624 aa, Arabidopsis thaliana; identical to SEQ ID NO: 100237
  peptide (1)..(624): Ceres Seq. ID no. 13604669

SEQ ID NO: 111477 - protein, 506 aa, Arabidopsis thaliana; identical to SEQ ID NO: 100238
  peptide (1)..(506): Ceres Seq. ID no. 13604670

SEQ ID NO: 111478 - protein, 443 aa, Arabidopsis thaliana; identical to SEQ ID NO: 100239
  peptide (1)..(443): Ceres Seq. ID no. 13604671

SEQ ID NO: 111479 - DNA, 2131 bp, Arabidopsis thaliana; identical to SEQ ID NO: 100240
  misc_feature (1)..(2131): Ceres Seq. ID no. 13604679
  misc_feature (1)..(2131): Ortholog of  Ceres SEQ ID NO 13622744 as cited in SEQ ID NO 0

SEQ ID NO: 111480 - protein, 617 aa, Arabidopsis thaliana; identical to SEQ ID NO: 100241
  peptide (1)..(617): Ceres Seq. ID no. 13604680

SEQ ID NO: 111481 - protein, 599 aa, Arabidopsis thaliana; identical to SEQ ID NO: 77745
  peptide (1)..(599): Ceres Seq. ID no. 13604681

SEQ ID NO: 111482 - protein, 567 aa, Arabidopsis thaliana; identical to SEQ ID NO: 77746
  peptide (1)..(567): Ceres Seq. ID no. 13604682

SEQ ID NO: 111483 - DNA, 1176 bp, Arabidopsis thaliana; identical to SEQ ID NO: 100244
  misc_feature (1)..(1176): Ceres Seq. ID no. 13604702
  misc_feature (1)..(1176): Ortholog of  Ceres SEQ ID NO 14304838 as cited in SEQ ID NO 59750

SEQ ID NO: 111484 - protein, 327 aa, Arabidopsis thaliana; identical to SEQ ID NO: 100245
  peptide (1)..(327): Ceres Seq. ID no. 13604703

SEQ ID NO: 111485 - protein, 324 aa, Arabidopsis thaliana; identical to SEQ ID NO: 100246
  peptide (1)..(324): Ceres Seq. ID no. 13604704

SEQ ID NO: 111486 - protein, 285 aa, Arabidopsis thaliana; identical to SEQ ID NO: 88802
  peptide (1)..(285): Ceres Seq. ID no. 13604705

SEQ ID NO: 111487 - DNA, 1181 bp, Arabidopsis thaliana; identical to SEQ ID NO: 100248
  misc_feature (1)..(1181): Ceres Seq. ID no. 13604733
  misc_feature (1)..(1181): Ortholog of  Ceres SEQ ID NO 12619999 as cited in SEQ ID NO 66123
  misc_feature (1)..(1181): Ortholog of  Ceres SEQ ID NO 13656436 as cited in SEQ ID NO 69154

SEQ ID NO: 111488 - protein, 210 aa, Arabidopsis thaliana; identical to SEQ ID NO: 100249
  peptide (1)..(210): Ceres Seq. ID no. 13604734

SEQ ID NO: 111489 - DNA, 2588 bp, Arabidopsis thaliana; identical to SEQ ID NO: 100250
  misc_feature (1)..(2588): Ceres Seq. ID no. 13604735
  misc_feature (1)..(2588): Ortholog of  Ceres SEQ ID NO 13598926 as cited in SEQ ID NO 0

SEQ ID NO: 111490 - protein, 805 aa, Arabidopsis thaliana; identical to SEQ ID NO: 100251
  peptide (1)..(805): Ceres Seq. ID no. 13604736

SEQ ID NO: 111491 - protein, 716 aa, Arabidopsis thaliana; identical to SEQ ID NO: 100252
  peptide (1)..(716): Ceres Seq. ID no. 13604737

SEQ ID NO: 111492 - protein, 703 aa, Arabidopsis thaliana; identical to SEQ ID NO: 100253
  peptide (1)..(703): Ceres Seq. ID no. 13604738

SEQ ID NO: 111493 - DNA, 886 bp, Arabidopsis thaliana; identical to SEQ ID NO: 100254
  misc_feature (1)..(886): Ceres Seq. ID no. 13604739
  misc_feature (1)..(886): Ortholog of  Ceres SEQ ID NO 12611101 as cited in SEQ ID NO 55920

SEQ ID NO: 111494 - protein, 238 aa, Arabidopsis thaliana; identical to SEQ ID NO: 100255
  peptide (1)..(238): Ceres Seq. ID no. 13604740

SEQ ID NO: 111495 - protein, 150 aa, Arabidopsis thaliana; identical to SEQ ID NO: 100256
  peptide (1)..(150): Ceres Seq. ID no. 13604741

SEQ ID NO: 111496 - DNA, 948 bp, Arabidopsis thaliana; identical to SEQ ID NO: 100257
  misc_feature (1)..(948): Ceres Seq. ID no. 13604742
  misc_feature (1)..(948): Ortholog of  Ceres SEQ ID NO 14305854 as cited in SEQ ID NO 52331
  misc_feature (1)..(948): Ortholog of  Ceres SEQ ID NO 15168588 as cited in SEQ ID NO 60235

SEQ ID NO: 111497 - protein, 238 aa, Arabidopsis thaliana; identical to SEQ ID NO: 100258
  peptide (1)..(238): Ceres Seq. ID no. 13604743

SEQ ID NO: 111498 - protein, 224 aa, Arabidopsis thaliana; identical to SEQ ID NO: 100259
  peptide (1)..(224): Ceres Seq. ID no. 13604744

SEQ ID NO: 111499 - protein, 182 aa, Arabidopsis thaliana; identical to SEQ ID NO: 100260
  peptide (1)..(182): Ceres Seq. ID no. 13604745

SEQ ID NO: 111500 - DNA, 839 bp, Arabidopsis thaliana; identical to SEQ ID NO: 100261
  misc_feature (1)..(839): Ceres Seq. ID no. 13604760
  misc_feature (1)..(839): Ortholog of  Ceres SEQ ID NO 12627215 as cited in SEQ ID NO 60976
  misc_feature (1)..(839): Ortholog of  Ceres SEQ ID NO 15178542 as cited in SEQ ID NO 65410
  misc_feature (1)..(839): Ortholog of  Ceres SEQ ID NO 12635879 as cited in SEQ ID NO 0
  misc_feature (1)..(839): Ortholog of  Ceres SEQ ID NO 13599649 as cited in SEQ ID NO 0

SEQ ID NO: 111501 - protein, 199 aa, Arabidopsis thaliana; identical to SEQ ID NO: 100262
  peptide (1)..(199): Ceres Seq. ID no. 13604761

SEQ ID NO: 111502 - protein, 173 aa, Arabidopsis thaliana; identical to SEQ ID NO: 100263
  peptide (1)..(173): Ceres Seq. ID no. 13604762

SEQ ID NO: 111503 - protein, 169 aa, Arabidopsis thaliana; identical to SEQ ID NO: 100264
  peptide (1)..(169): Ceres Seq. ID no. 13604763

SEQ ID NO: 111504 - DNA, 846 bp, Arabidopsis thaliana; identical to SEQ ID NO: 100265
  misc_feature (1)..(846): Ceres Seq. ID no. 13604768
  misc_feature (1)..(846): Ortholog of  Ceres SEQ ID NO 14316118 as cited in SEQ ID NO 52391
  misc_feature (1)..(846): Ortholog of  Ceres SEQ ID NO 14316060 as cited in SEQ ID NO 52465
  misc_feature (1)..(846): Ortholog of  Ceres SEQ ID NO 13664032 as cited in SEQ ID NO 67527

SEQ ID NO: 111505 - protein, 141 aa, Arabidopsis thaliana; identical to SEQ ID NO: 27889
  peptide (1)..(141): Ceres Seq. ID no. 13604769

SEQ ID NO: 111506 - protein, 107 aa, Arabidopsis thaliana; identical to SEQ ID NO: 27890
  peptide (1)..(107): Ceres Seq. ID no. 13604770

SEQ ID NO: 111507 - DNA, 863 bp, Arabidopsis thaliana; identical to SEQ ID NO: 100268
  misc_feature (1)..(863): Ceres Seq. ID no. 13604771
  misc_feature (1)..(863): Ortholog of  Ceres SEQ ID NO 14304879 as cited in SEQ ID NO 53767

SEQ ID NO: 111508 - protein, 244 aa, Arabidopsis thaliana; identical to SEQ ID NO: 100269
  peptide (1)..(244): Ceres Seq. ID no. 13604772

SEQ ID NO: 111509 - protein, 235 aa, Arabidopsis thaliana; identical to SEQ ID NO: 100270
  peptide (1)..(235): Ceres Seq. ID no. 13604773

SEQ ID NO: 111510 - protein, 197 aa, Arabidopsis thaliana; identical to SEQ ID NO: 100271
  peptide (1)..(197): Ceres Seq. ID no. 13604774

SEQ ID NO: 111511 - DNA, 869 bp, Arabidopsis thaliana; identical to SEQ ID NO: 100272
  misc_feature (1)..(869): Ceres Seq. ID no. 13604775
  misc_feature (1)..(869): Ortholog of  Ceres SEQ ID NO 13664032 as cited in SEQ ID NO 67527

SEQ ID NO: 111512 - protein, 160 aa, Arabidopsis thaliana; identical to SEQ ID NO: 100273
  peptide (1)..(160): Ceres Seq. ID no. 13604776

SEQ ID NO: 111513 - protein, 114 aa, Arabidopsis thaliana; identical to SEQ ID NO: 100274
  peptide (1)..(114): Ceres Seq. ID no. 13604777

SEQ ID NO: 111514 - protein, 113 aa, Arabidopsis thaliana; identical to SEQ ID NO: 100275
  peptide (1)..(113): Ceres Seq. ID no. 13604778

SEQ ID NO: 111515 - DNA, 1792 bp, Arabidopsis thaliana; identical to SEQ ID NO: 100276
  misc_feature (1)..(1792): Ceres Seq. ID no. 13604779
  misc_feature (1)..(1792): Ortholog of  Ceres SEQ ID NO 13597865 as cited in SEQ ID NO 64954

SEQ ID NO: 111516 - protein, 553 aa, Arabidopsis thaliana; identical to SEQ ID NO: 100277
  peptide (1)..(553): Ceres Seq. ID no. 13604780

SEQ ID NO: 111517 - protein, 525 aa, Arabidopsis thaliana; identical to SEQ ID NO: 100278
  peptide (1)..(525): Ceres Seq. ID no. 13604781

SEQ ID NO: 111518 - protein, 483 aa, Arabidopsis thaliana; identical to SEQ ID NO: 100279
  peptide (1)..(483): Ceres Seq. ID no. 13604782

SEQ ID NO: 111519 - DNA, 1561 bp, Arabidopsis thaliana; identical to SEQ ID NO: 100280
  misc_feature (1)..(1561): Ceres Seq. ID no. 13604808
  misc_feature (1)..(1561): Ortholog of  Ceres SEQ ID NO 14308209 as cited in SEQ ID NO 58800

SEQ ID NO: 111520 - protein, 393 aa, Arabidopsis thaliana; identical to SEQ ID NO: 26544
  peptide (1)..(393): Ceres Seq. ID no. 13604809

SEQ ID NO: 111521 - protein, 288 aa, Arabidopsis thaliana; identical to SEQ ID NO: 26545
  peptide (1)..(288): Ceres Seq. ID no. 13604810

SEQ ID NO: 111522 - protein, 201 aa, Arabidopsis thaliana; identical to SEQ ID NO: 26546
  peptide (1)..(201): Ceres Seq. ID no. 13604811

SEQ ID NO: 111523 - DNA, 1671 bp, Arabidopsis thaliana; identical to SEQ ID NO: 100284
  misc_feature (1)..(1671): Ceres Seq. ID no. 13604820
  misc_feature (1)..(1671): Ortholog of  Ceres SEQ ID NO 14307863 as cited in SEQ ID NO 20504

SEQ ID NO: 111524 - protein, 450 aa, Arabidopsis thaliana; identical to SEQ ID NO: 24489
  peptide (1)..(450): Ceres Seq. ID no. 13604821

SEQ ID NO: 111525 - protein, 415 aa, Arabidopsis thaliana; identical to SEQ ID NO: 24490
  peptide (1)..(415): Ceres Seq. ID no. 13604822

SEQ ID NO: 111526 - DNA, 1732 bp, Arabidopsis thaliana; identical to SEQ ID NO: 100287
  misc_feature (1)..(1732): Ceres Seq. ID no. 13604823
  misc_feature (1)..(1732): Ortholog of  Ceres SEQ ID NO 13502874 as cited in SEQ ID NO 66298
  misc_feature (1)..(1732): Ortholog of  Ceres SEQ ID NO 12614124 as cited in SEQ ID NO 68392

SEQ ID NO: 111527 - protein, 533 aa, Arabidopsis thaliana; identical to SEQ ID NO: 100288
  peptide (1)..(533): Ceres Seq. ID no. 13604824

SEQ ID NO: 111528 - protein, 438 aa, Arabidopsis thaliana; identical to SEQ ID NO: 100289
  peptide (1)..(438): Ceres Seq. ID no. 13604825

SEQ ID NO: 111529 - protein, 416 aa, Arabidopsis thaliana; identical to SEQ ID NO: 100290
  peptide (1)..(416): Ceres Seq. ID no. 13604826

SEQ ID NO: 111530 - DNA, 2018 bp, Arabidopsis thaliana; identical to SEQ ID NO: 100291
  misc_feature (1)..(2018): Ceres Seq. ID no. 13604831
  misc_feature (1)..(2018): Ortholog of  Ceres SEQ ID NO 13594536 as cited in SEQ ID NO 51382
  misc_feature (1)..(2018): Ortholog of  Ceres SEQ ID NO 15172549 as cited in SEQ ID NO 57185

SEQ ID NO: 111531 - protein, 539 aa, Arabidopsis thaliana; identical to SEQ ID NO: 100292
  peptide (1)..(539): Ceres Seq. ID no. 13604832

SEQ ID NO: 111532 - protein, 457 aa, Arabidopsis thaliana; identical to SEQ ID NO: 100293
  peptide (1)..(457): Ceres Seq. ID no. 13604833

SEQ ID NO: 111533 - protein, 444 aa, Arabidopsis thaliana; identical to SEQ ID NO: 100294
  peptide (1)..(444): Ceres Seq. ID no. 13604834

SEQ ID NO: 111534 - DNA, 2117 bp, Arabidopsis thaliana; identical to SEQ ID NO: 100295
  misc_feature (1)..(2117): Ceres Seq. ID no. 13604839
  misc_feature (1)..(2117): Ortholog of  Ceres SEQ ID NO 15168488 as cited in SEQ ID NO 59179

SEQ ID NO: 111535 - protein, 632 aa, Arabidopsis thaliana; identical to SEQ ID NO: 100296
  peptide (1)..(632): Ceres Seq. ID no. 13604840

SEQ ID NO: 111536 - protein, 557 aa, Arabidopsis thaliana; identical to SEQ ID NO: 100297
  peptide (1)..(557): Ceres Seq. ID no. 13604841

SEQ ID NO: 111537 - protein, 480 aa, Arabidopsis thaliana; identical to SEQ ID NO: 100298
  peptide (1)..(480): Ceres Seq. ID no. 13604842

SEQ ID NO: 111538 - DNA, 951 bp, Arabidopsis thaliana; identical to SEQ ID NO: 100299
  misc_feature (1)..(951): Ceres Seq. ID no. 13604843
  misc_feature (1)..(951): Ortholog of  Ceres SEQ ID NO 13638877 as cited in SEQ ID NO 55794
  misc_feature (1)..(951): Ortholog of  Ceres SEQ ID NO 13656156 as cited in SEQ ID NO 64620

SEQ ID NO: 111539 - protein, 308 aa, Arabidopsis thaliana; identical to SEQ ID NO: 100300
  peptide (1)..(308): Ceres Seq. ID no. 13604844

SEQ ID NO: 111540 - protein, 276 aa, Arabidopsis thaliana; identical to SEQ ID NO: 75813
  peptide (1)..(276): Ceres Seq. ID no. 13604845

SEQ ID NO: 111541 - protein, 213 aa, Arabidopsis thaliana; identical to SEQ ID NO: 75814
  peptide (1)..(213): Ceres Seq. ID no. 13604846

SEQ ID NO: 111542 - DNA, 1103 bp, Arabidopsis thaliana; identical to SEQ ID NO: 100303
  misc_feature (1)..(1103): Ceres Seq. ID no. 13604847
  misc_feature (1)..(1103): Ortholog of  Ceres SEQ ID NO 12609045 as cited in SEQ ID NO 51314
  misc_feature (1)..(1103): Ortholog of  Ceres SEQ ID NO 14316312 as cited in SEQ ID NO 60042
  misc_feature (1)..(1103): Ortholog of  Ceres SEQ ID NO 13595877 as cited in SEQ ID NO 67702
  misc_feature (1)..(1103): Ortholog of  Ceres SEQ ID NO 13654367 as cited in SEQ ID NO 67993

SEQ ID NO: 111543 - protein, 338 aa, Arabidopsis thaliana; identical to SEQ ID NO: 100304
  peptide (1)..(338): Ceres Seq. ID no. 13604848

SEQ ID NO: 111544 - protein, 329 aa, Arabidopsis thaliana; identical to SEQ ID NO: 100305
  peptide (1)..(329): Ceres Seq. ID no. 13604849

SEQ ID NO: 111545 - protein, 315 aa, Arabidopsis thaliana; identical to SEQ ID NO: 100306
  peptide (1)..(315): Ceres Seq. ID no. 13604850

SEQ ID NO: 111546 - DNA, 1126 bp, Arabidopsis thaliana; identical to SEQ ID NO: 100307
  misc_feature (1)..(1126): Ceres Seq. ID no. 13604855
  misc_feature (1)..(1126): Ortholog of  Ceres SEQ ID NO 15178797 as cited in SEQ ID NO 1152
  misc_feature (1)..(1126): Ortholog of  Ceres SEQ ID NO 15175688 as cited in SEQ ID NO 60465
  misc_feature (1)..(1126): Ortholog of  Ceres SEQ ID NO 13495628 as cited in SEQ ID NO 60727

SEQ ID NO: 111547 - protein, 337 aa, Arabidopsis thaliana; identical to SEQ ID NO: 100308
  peptide (1)..(337): Ceres Seq. ID no. 13604856

SEQ ID NO: 111548 - protein, 330 aa, Arabidopsis thaliana; identical to SEQ ID NO: 100309
  peptide (1)..(330): Ceres Seq. ID no. 13604857

SEQ ID NO: 111549 - protein, 208 aa, Arabidopsis thaliana; identical to SEQ ID NO: 27082
  peptide (1)..(208): Ceres Seq. ID no. 13604858

SEQ ID NO: 111550 - DNA, 1549 bp, Arabidopsis thaliana; identical to SEQ ID NO: 100311
  misc_feature (1)..(1549): Ceres Seq. ID no. 13604859
  misc_feature (1)..(1549): Ortholog of  Ceres SEQ ID NO 14314363 as cited in SEQ ID NO 52272

SEQ ID NO: 111551 - protein, 330 aa, Arabidopsis thaliana; identical to SEQ ID NO: 100312
  peptide (1)..(330): Ceres Seq. ID no. 13604860

SEQ ID NO: 111552 - protein, 309 aa, Arabidopsis thaliana; identical to SEQ ID NO: 100313
  peptide (1)..(309): Ceres Seq. ID no. 13604861

SEQ ID NO: 111553 - protein, 288 aa, Arabidopsis thaliana; identical to SEQ ID NO: 100314
  peptide (1)..(288): Ceres Seq. ID no. 13604862

SEQ ID NO: 111554 - DNA, 1500 bp, Arabidopsis thaliana; identical to SEQ ID NO: 100315
  misc_feature (1)..(1500): Ceres Seq. ID no. 13604867
  misc_feature (1)..(1500): Ortholog of  Ceres SEQ ID NO 12636774 as cited in SEQ ID NO 372
  misc_feature (1)..(1500): Ortholog of  Ceres SEQ ID NO 12476493 as cited in SEQ ID NO 58163
  misc_feature (1)..(1500): Ortholog of  Ceres SEQ ID NO 13597295 as cited in SEQ ID NO 63743
  misc_feature (1)..(1500): Ortholog of  Ceres SEQ ID NO 13597439 as cited in SEQ ID NO 64081
  misc_feature (1)..(1500): Ortholog of  Ceres SEQ ID NO 13597233 as cited in SEQ ID NO 64370
  misc_feature (1)..(1500): Ortholog of  Ceres SEQ ID NO 15226354 as cited in SEQ ID NO 0

SEQ ID NO: 111555 - protein, 380 aa, Arabidopsis thaliana; identical to SEQ ID NO: 100316
  peptide (1)..(380): Ceres Seq. ID no. 13604868

SEQ ID NO: 111556 - protein, 271 aa, Arabidopsis thaliana; identical to SEQ ID NO: 100317
  peptide (1)..(271): Ceres Seq. ID no. 13604869

SEQ ID NO: 111557 - protein, 206 aa, Arabidopsis thaliana; identical to SEQ ID NO: 100318
  peptide (1)..(206): Ceres Seq. ID no. 13604870

SEQ ID NO: 111558 - DNA, 864 bp, Arabidopsis thaliana; identical to SEQ ID NO: 100319
  misc_feature (1)..(864): Ceres Seq. ID no. 13604873
  misc_feature (1)..(864): Ortholog of  Ceres SEQ ID NO 13595919 as cited in SEQ ID NO 67751

SEQ ID NO: 111559 - protein, 235 aa, Arabidopsis thaliana; identical to SEQ ID NO: 100320
  peptide (1)..(235): Ceres Seq. ID no. 13604874

SEQ ID NO: 111560 - protein, 219 aa, Arabidopsis thaliana; identical to SEQ ID NO: 72769
  peptide (1)..(219): Ceres Seq. ID no. 13604875

SEQ ID NO: 111561 - DNA, 1756 bp, Arabidopsis thaliana; identical to SEQ ID NO: 100322
  misc_feature (1)..(1756): Ceres Seq. ID no. 13604876
  misc_feature (1)..(1756): Ortholog of  Ceres SEQ ID NO 15179918 as cited in SEQ ID NO 57077

SEQ ID NO: 111562 - protein, 520 aa, Arabidopsis thaliana; identical to SEQ ID NO: 100323
  peptide (1)..(520): Ceres Seq. ID no. 13604877

SEQ ID NO: 111563 - protein, 516 aa, Arabidopsis thaliana; identical to SEQ ID NO: 100324
  peptide (1)..(516): Ceres Seq. ID no. 13604878

SEQ ID NO: 111564 - protein, 500 aa, Arabidopsis thaliana; identical to SEQ ID NO: 100325
  peptide (1)..(500): Ceres Seq. ID no. 13604879

SEQ ID NO: 111565 - DNA, 3510 bp, Arabidopsis thaliana; identical to SEQ ID NO: 100326
  misc_feature (1)..(3510): Ceres Seq. ID no. 13604883
  misc_feature (1)..(3510): Ortholog of  Ceres SEQ ID NO 13658778 as cited in SEQ ID NO 66511

SEQ ID NO: 111566 - protein, 1111 aa, Arabidopsis thaliana; identical to SEQ ID NO: 100327
  peptide (1)..(1111): Ceres Seq. ID no. 13604884

SEQ ID NO: 111567 - protein, 1045 aa, Arabidopsis thaliana; identical to SEQ ID NO: 100328
  peptide (1)..(1045): Ceres Seq. ID no. 13604885

SEQ ID NO: 111568 - protein, 1018 aa, Arabidopsis thaliana; identical to SEQ ID NO: 100329
  peptide (1)..(1018): Ceres Seq. ID no. 13604886

SEQ ID NO: 111569 - DNA, 1662 bp, Arabidopsis thaliana; identical to SEQ ID NO: 100330
  misc_feature (1)..(1662): Ceres Seq. ID no. 13604887
  misc_feature (1)..(1662): Ortholog of  Ceres SEQ ID NO 14305697 as cited in SEQ ID NO 52505
  misc_feature (1)..(1662): Ortholog of  Ceres SEQ ID NO 15179023 as cited in SEQ ID NO 0

SEQ ID NO: 111570 - protein, 448 aa, Arabidopsis thaliana; identical to SEQ ID NO: 26270
  peptide (1)..(448): Ceres Seq. ID no. 13604888

SEQ ID NO: 111571 - protein, 296 aa, Arabidopsis thaliana; identical to SEQ ID NO: 26271
  peptide (1)..(296): Ceres Seq. ID no. 13604889

SEQ ID NO: 111572 - DNA, 3736 bp, Arabidopsis thaliana; identical to SEQ ID NO: 100333
  misc_feature (1)..(3736): Ceres Seq. ID no. 13604890
  misc_feature (1)..(3736): Ortholog of  Ceres SEQ ID NO 14303524 as cited in SEQ ID NO 59500
  misc_feature (1)..(3736): Ortholog of  Ceres SEQ ID NO 13658778 as cited in SEQ ID NO 66511

SEQ ID NO: 111573 - protein, 1084 aa, Arabidopsis thaliana; identical to SEQ ID NO: 100334
  peptide (1)..(1084): Ceres Seq. ID no. 13604891

SEQ ID NO: 111574 - protein, 967 aa, Arabidopsis thaliana; identical to SEQ ID NO: 100335
  peptide (1)..(967): Ceres Seq. ID no. 13604892

SEQ ID NO: 111575 - protein, 925 aa, Arabidopsis thaliana; identical to SEQ ID NO: 100336
  peptide (1)..(925): Ceres Seq. ID no. 13604893

SEQ ID NO: 111576 - DNA, 2603 bp, Arabidopsis thaliana; identical to SEQ ID NO: 100337
  misc_feature (1)..(2603): Ceres Seq. ID no. 13604898
  misc_feature (1)..(2603): Ortholog of  Ceres SEQ ID NO 13657677 as cited in SEQ ID NO 66119

SEQ ID NO: 111577 - protein, 753 aa, Arabidopsis thaliana; identical to SEQ ID NO: 100338
  peptide (1)..(753): Ceres Seq. ID no. 13604899

SEQ ID NO: 111578 - protein, 729 aa, Arabidopsis thaliana; identical to SEQ ID NO: 100339
  peptide (1)..(729): Ceres Seq. ID no. 13604900

SEQ ID NO: 111579 - protein, 611 aa, Arabidopsis thaliana; identical to SEQ ID NO: 100340
  peptide (1)..(611): Ceres Seq. ID no. 13604901

SEQ ID NO: 111580 - DNA, 1953 bp, Arabidopsis thaliana; identical to SEQ ID NO: 100341
  misc_feature (1)..(1953): Ceres Seq. ID no. 13604902
  misc_feature (1)..(1953): Ortholog of  Ceres SEQ ID NO 15171212 as cited in SEQ ID NO 56899
  misc_feature (1)..(1953): Ortholog of  Ceres SEQ ID NO 12613725 as cited in SEQ ID NO 68196

SEQ ID NO: 111581 - protein, 570 aa, Arabidopsis thaliana; identical to SEQ ID NO: 100342
  peptide (1)..(570): Ceres Seq. ID no. 13604903

SEQ ID NO: 111582 - protein, 522 aa, Arabidopsis thaliana; identical to SEQ ID NO: 100343
  peptide (1)..(522): Ceres Seq. ID no. 13604904

SEQ ID NO: 111583 - protein, 510 aa, Arabidopsis thaliana; identical to SEQ ID NO: 100344
  peptide (1)..(510): Ceres Seq. ID no. 13604905

SEQ ID NO: 111584 - DNA, 1575 bp, Arabidopsis thaliana; identical to SEQ ID NO: 100345
  misc_feature (1)..(1575): Ceres Seq. ID no. 13604906
  misc_feature (1)..(1575): Ortholog of  Ceres SEQ ID NO 15171245 as cited in SEQ ID NO 52264
  misc_feature (1)..(1575): Ortholog of  Ceres SEQ ID NO 14303576 as cited in SEQ ID NO 68428

SEQ ID NO: 111585 - protein, 452 aa, Arabidopsis thaliana; identical to SEQ ID NO: 100346
  peptide (1)..(452): Ceres Seq. ID no. 13604907

SEQ ID NO: 111586 - protein, 361 aa, Arabidopsis thaliana; identical to SEQ ID NO: 100347
  peptide (1)..(361): Ceres Seq. ID no. 13604908

SEQ ID NO: 111587 - protein, 242 aa, Arabidopsis thaliana; identical to SEQ ID NO: 100348
  peptide (1)..(242): Ceres Seq. ID no. 13604909

SEQ ID NO: 111588 - DNA, 1360 bp, Arabidopsis thaliana; identical to SEQ ID NO: 100349
  misc_feature (1)..(1360): Ceres Seq. ID no. 13604910
  misc_feature (1)..(1360): Ortholog of  Ceres SEQ ID NO 14306627 as cited in SEQ ID NO 53023
  misc_feature (1)..(1360): Ortholog of  Ceres SEQ ID NO 15174917 as cited in SEQ ID NO 53650
  misc_feature (1)..(1360): Ortholog of  Ceres SEQ ID NO 14304034 as cited in SEQ ID NO 53878
  misc_feature (1)..(1360): Ortholog of  Ceres SEQ ID NO 14307559 as cited in SEQ ID NO 54006
  misc_feature (1)..(1360): Ortholog of  Ceres SEQ ID NO 13663874 as cited in SEQ ID NO 67003

SEQ ID NO: 111589 - protein, 250 aa, Arabidopsis thaliana; identical to SEQ ID NO: 100350
  peptide (1)..(250): Ceres Seq. ID no. 13604911

SEQ ID NO: 111590 - protein, 188 aa, Arabidopsis thaliana; identical to SEQ ID NO: 100351
  peptide (1)..(188): Ceres Seq. ID no. 13604912

SEQ ID NO: 111591 - DNA, 2146 bp, Arabidopsis thaliana; identical to SEQ ID NO: 100352
  misc_feature (1)..(2146): Ceres Seq. ID no. 13604913
  misc_feature (1)..(2146): Ortholog of  Ceres SEQ ID NO 13654989 as cited in SEQ ID NO 63117
  misc_feature (1)..(2146): Ortholog of  Ceres SEQ ID NO 13584744 as cited in SEQ ID NO 69137

SEQ ID NO: 111592 - protein, 558 aa, Arabidopsis thaliana; identical to SEQ ID NO: 100353
  peptide (1)..(558): Ceres Seq. ID no. 13604914

SEQ ID NO: 111593 - protein, 399 aa, Arabidopsis thaliana; identical to SEQ ID NO: 100354
  peptide (1)..(399): Ceres Seq. ID no. 13604915

SEQ ID NO: 111594 - protein, 393 aa, Arabidopsis thaliana; identical to SEQ ID NO: 100355
  peptide (1)..(393): Ceres Seq. ID no. 13604916

SEQ ID NO: 111595 - DNA, 1936 bp, Arabidopsis thaliana; identical to SEQ ID NO: 100356
  misc_feature (1)..(1936): Ceres Seq. ID no. 13604921
  misc_feature (1)..(1936): Ortholog of  Ceres SEQ ID NO 15174638 as cited in SEQ ID NO 53185
  misc_feature (1)..(1936): Ortholog of  Ceres SEQ ID NO 15169072 as cited in SEQ ID NO 53955
  misc_feature (1)..(1936): Ortholog of  Ceres SEQ ID NO 13657460 as cited in SEQ ID NO 66115
  misc_feature (1)..(1936): Ortholog of  Ceres SEQ ID NO 13659394 as cited in SEQ ID NO 67049

SEQ ID NO: 111596 - protein, 547 aa, Arabidopsis thaliana; identical to SEQ ID NO: 100357
  peptide (1)..(547): Ceres Seq. ID no. 13604922

SEQ ID NO: 111597 - protein, 521 aa, Arabidopsis thaliana; identical to SEQ ID NO: 100358
  peptide (1)..(521): Ceres Seq. ID no. 13604923

SEQ ID NO: 111598 - protein, 506 aa, Arabidopsis thaliana; identical to SEQ ID NO: 100359
  peptide (1)..(506): Ceres Seq. ID no. 13604924

SEQ ID NO: 111599 - DNA, 2021 bp, Arabidopsis thaliana; identical to SEQ ID NO: 100360
  misc_feature (1)..(2021): Ceres Seq. ID no. 13604933
  misc_feature (1)..(2021): Ortholog of  Ceres SEQ ID NO 13594037 as cited in SEQ ID NO 55666
  misc_feature (1)..(2021): Ortholog of  Ceres SEQ ID NO 13657707 as cited in SEQ ID NO 66407

SEQ ID NO: 111600 - protein, 568 aa, Arabidopsis thaliana; identical to SEQ ID NO: 100361
  peptide (1)..(568): Ceres Seq. ID no. 13604934

SEQ ID NO: 111601 - protein, 545 aa, Arabidopsis thaliana; identical to SEQ ID NO: 100362
  peptide (1)..(545): Ceres Seq. ID no. 13604935

SEQ ID NO: 111602 - protein, 500 aa, Arabidopsis thaliana; identical to SEQ ID NO: 100363
  peptide (1)..(500): Ceres Seq. ID no. 13604936

SEQ ID NO: 111603 - DNA, 2237 bp, Arabidopsis thaliana; identical to SEQ ID NO: 100364
  misc_feature (1)..(2237): Ceres Seq. ID no. 13604939
  misc_feature (1)..(2237): Ortholog of  Ceres SEQ ID NO 13597375 as cited in SEQ ID NO 63986

SEQ ID NO: 111604 - protein, 638 aa, Arabidopsis thaliana; identical to SEQ ID NO: 100365
  peptide (1)..(638): Ceres Seq. ID no. 13604940

SEQ ID NO: 111605 - protein, 537 aa, Arabidopsis thaliana; identical to SEQ ID NO: 100366
  peptide (1)..(537): Ceres Seq. ID no. 13604941

SEQ ID NO: 111606 - protein, 469 aa, Arabidopsis thaliana; identical to SEQ ID NO: 100367
  peptide (1)..(469): Ceres Seq. ID no. 13604942

SEQ ID NO: 111607 - DNA, 1742 bp, Arabidopsis thaliana; identical to SEQ ID NO: 100368
  misc_feature (1)..(1742): Ceres Seq. ID no. 13604949
  misc_feature (1)..(1742): Ortholog of  Ceres SEQ ID NO 13657460 as cited in SEQ ID NO 66115
  misc_feature (1)..(1742): Ortholog of  Ceres SEQ ID NO 13659394 as cited in SEQ ID NO 67049

SEQ ID NO: 111608 - protein, 445 aa, Arabidopsis thaliana; identical to SEQ ID NO: 100369
  peptide (1)..(445): Ceres Seq. ID no. 13604950

SEQ ID NO: 111609 - protein, 333 aa, Arabidopsis thaliana; identical to SEQ ID NO: 100370
  peptide (1)..(333): Ceres Seq. ID no. 13604951

SEQ ID NO: 111610 - protein, 331 aa, Arabidopsis thaliana; identical to SEQ ID NO: 100371
  peptide (1)..(331): Ceres Seq. ID no. 13604952

SEQ ID NO: 111611 - DNA, 499 bp, Arabidopsis thaliana; identical to SEQ ID NO: 100372
  misc_feature (1)..(499): Ceres Seq. ID no. 13604965
  misc_feature (1)..(499): Ortholog of  Ceres SEQ ID NO 13504224 as cited in SEQ ID NO 137
  misc_feature (1)..(499): Ortholog of  Ceres SEQ ID NO 12635820 as cited in SEQ ID NO 0

SEQ ID NO: 111612 - protein, 110 aa, Arabidopsis thaliana; identical to SEQ ID NO: 100373
  peptide (1)..(110): Ceres Seq. ID no. 13604966

SEQ ID NO: 111613 - protein, 60 aa, Arabidopsis thaliana; identical to SEQ ID NO: 100374
  peptide (1)..(60): Ceres Seq. ID no. 13604967

SEQ ID NO: 111614 - DNA, 924 bp, Arabidopsis thaliana; identical to SEQ ID NO: 100375
  misc_feature (1)..(924): Ceres Seq. ID no. 13604976
  misc_feature (1)..(924): Ortholog of  Ceres SEQ ID NO 13595569 as cited in SEQ ID NO 56778
  misc_feature (1)..(924): Ortholog of  Ceres SEQ ID NO 12611159 as cited in SEQ ID NO 59821

SEQ ID NO: 111615 - protein, 267 aa, Arabidopsis thaliana; identical to SEQ ID NO: 100376
  peptide (1)..(267): Ceres Seq. ID no. 13604977

SEQ ID NO: 111616 - protein, 248 aa, Arabidopsis thaliana; identical to SEQ ID NO: 100377
  peptide (1)..(248): Ceres Seq. ID no. 13604978

SEQ ID NO: 111617 - DNA, 933 bp, Arabidopsis thaliana; identical to SEQ ID NO: 100378
  misc_feature (1)..(933): Ceres Seq. ID no. 13604979
  misc_feature (1)..(933): Ortholog of  Ceres SEQ ID NO 15176306 as cited in SEQ ID NO 52784
  misc_feature (1)..(933): Ortholog of  Ceres SEQ ID NO 13582624 as cited in SEQ ID NO 56287
  misc_feature (1)..(933): Ortholog of  Ceres SEQ ID NO 13597264 as cited in SEQ ID NO 63897
  misc_feature (1)..(933): Ortholog of  Ceres SEQ ID NO 13656452 as cited in SEQ ID NO 65745

SEQ ID NO: 111618 - protein, 280 aa, Arabidopsis thaliana; identical to SEQ ID NO: 100379
  peptide (1)..(280): Ceres Seq. ID no. 13604980

SEQ ID NO: 111619 - protein, 184 aa, Arabidopsis thaliana; identical to SEQ ID NO: 100380
  peptide (1)..(184): Ceres Seq. ID no. 13604981

SEQ ID NO: 111620 - DNA, 1069 bp, Arabidopsis thaliana; identical to SEQ ID NO: 100381
  misc_feature (1)..(1069): Ceres Seq. ID no. 13604988
  misc_feature (1)..(1069): Ortholog of  Ceres SEQ ID NO 14305743 as cited in SEQ ID NO 52462
  misc_feature (1)..(1069): Ortholog of  Ceres SEQ ID NO 13623029 as cited in SEQ ID NO 0

SEQ ID NO: 111621 - protein, 187 aa, Arabidopsis thaliana; identical to SEQ ID NO: 100382
  peptide (1)..(187): Ceres Seq. ID no. 13604989

SEQ ID NO: 111622 - DNA, 2554 bp, Arabidopsis thaliana; identical to SEQ ID NO: 100383
  misc_feature (1)..(2554): Ceres Seq. ID no. 13604994
  misc_feature (1)..(2554): Ortholog of  Ceres SEQ ID NO 13657677 as cited in SEQ ID NO 66119

SEQ ID NO: 111623 - protein, 593 aa, Arabidopsis thaliana; identical to SEQ ID NO: 100384
  peptide (1)..(593): Ceres Seq. ID no. 13604995

SEQ ID NO: 111624 - protein, 546 aa, Arabidopsis thaliana; identical to SEQ ID NO: 100385
  peptide (1)..(546): Ceres Seq. ID no. 13604996

SEQ ID NO: 111625 - protein, 466 aa, Arabidopsis thaliana; identical to SEQ ID NO: 100386
  peptide (1)..(466): Ceres Seq. ID no. 13604997

SEQ ID NO: 111626 - DNA, 934 bp, Arabidopsis thaliana; identical to SEQ ID NO: 100387
  misc_feature (1)..(934): Ceres Seq. ID no. 13604998
  misc_feature (1)..(934): Ortholog of  Ceres SEQ ID NO 13654322 as cited in SEQ ID NO 67858
  misc_feature (1)..(934): Ortholog of  Ceres SEQ ID NO 15226179 as cited in SEQ ID NO 0

SEQ ID NO: 111627 - protein, 251 aa, Arabidopsis thaliana; identical to SEQ ID NO: 100388
  peptide (1)..(251): Ceres Seq. ID no. 13604999

SEQ ID NO: 111628 - protein, 162 aa, Arabidopsis thaliana; identical to SEQ ID NO: 100389
  peptide (1)..(162): Ceres Seq. ID no. 13605000

SEQ ID NO: 111629 - protein, 159 aa, Arabidopsis thaliana; identical to SEQ ID NO: 100390
  peptide (1)..(159): Ceres Seq. ID no. 13605001

SEQ ID NO: 111630 - DNA, 859 bp, Arabidopsis thaliana; identical to SEQ ID NO: 100391
  misc_feature (1)..(859): Ceres Seq. ID no. 13605010
  misc_feature (1)..(859): Ortholog of  Ceres SEQ ID NO 12467471 as cited in SEQ ID NO 55509
  misc_feature (1)..(859): Ortholog of  Ceres SEQ ID NO 13598557 as cited in SEQ ID NO 65168

SEQ ID NO: 111631 - protein, 189 aa, Arabidopsis thaliana; identical to SEQ ID NO: 100392
  peptide (1)..(189): Ceres Seq. ID no. 13605011

SEQ ID NO: 111632 - protein, 170 aa, Arabidopsis thaliana; identical to SEQ ID NO: 100393
  peptide (1)..(170): Ceres Seq. ID no. 13605012

SEQ ID NO: 111633 - DNA, 1994 bp, Arabidopsis thaliana; identical to SEQ ID NO: 100394
  misc_feature (1)..(1994): Ceres Seq. ID no. 13605032
  misc_feature (1)..(1994): Ortholog of  Ceres SEQ ID NO 15170788 as cited in SEQ ID NO 52635
  misc_feature (1)..(1994): Ortholog of  Ceres SEQ ID NO 13638058 as cited in SEQ ID NO 55054
  misc_feature (1)..(1994): Ortholog of  Ceres SEQ ID NO 15170362 as cited in SEQ ID NO 57883
  misc_feature (1)..(1994): Ortholog of  Ceres SEQ ID NO 14303297 as cited in SEQ ID NO 67765

SEQ ID NO: 111634 - protein, 603 aa, Arabidopsis thaliana; identical to SEQ ID NO: 100395
  peptide (1)..(603): Ceres Seq. ID no. 13605033

SEQ ID NO: 111635 - protein, 375 aa, Arabidopsis thaliana; identical to SEQ ID NO: 100396
  peptide (1)..(375): Ceres Seq. ID no. 13605034

SEQ ID NO: 111636 - protein, 371 aa, Arabidopsis thaliana; identical to SEQ ID NO: 100397
  peptide (1)..(371): Ceres Seq. ID no. 13605035

SEQ ID NO: 111637 - DNA, 1416 bp, Arabidopsis thaliana; identical to SEQ ID NO: 100398
  misc_feature (1)..(1416): Ceres Seq. ID no. 13605036
  misc_feature (1)..(1416): Ortholog of  Ceres SEQ ID NO 13581701 as cited in SEQ ID NO 51151
  misc_feature (1)..(1416): Ortholog of  Ceres SEQ ID NO 14315491 as cited in SEQ ID NO 57026

SEQ ID NO: 111638 - protein, 401 aa, Arabidopsis thaliana; identical to SEQ ID NO: 100399
  peptide (1)..(401): Ceres Seq. ID no. 13605037

SEQ ID NO: 111639 - protein, 396 aa, Arabidopsis thaliana; identical to SEQ ID NO: 100400
  peptide (1)..(396): Ceres Seq. ID no. 13605038

SEQ ID NO: 111640 - DNA, 3508 bp, Arabidopsis thaliana; identical to SEQ ID NO: 100401
  misc_feature (1)..(3508): Ceres Seq. ID no. 13605039
  misc_feature (1)..(3508): Ortholog of  Ceres SEQ ID NO 13595166 as cited in SEQ ID NO 56250
  misc_feature (1)..(3508): Ortholog of  Ceres SEQ ID NO 13599417 as cited in SEQ ID NO 0

SEQ ID NO: 111641 - protein, 1086 aa, Arabidopsis thaliana; identical to SEQ ID NO: 100402
  peptide (1)..(1086): Ceres Seq. ID no. 13605040

SEQ ID NO: 111642 - protein, 1079 aa, Arabidopsis thaliana; identical to SEQ ID NO: 100403
  peptide (1)..(1079): Ceres Seq. ID no. 13605041

SEQ ID NO: 111643 - protein, 1067 aa, Arabidopsis thaliana; identical to SEQ ID NO: 100404
  peptide (1)..(1067): Ceres Seq. ID no. 13605042

SEQ ID NO: 111644 - DNA, 1861 bp, Arabidopsis thaliana; identical to SEQ ID NO: 100405
  misc_feature (1)..(1861): Ceres Seq. ID no. 13605051
  misc_feature (1)..(1861): Ortholog of  Ceres SEQ ID NO 14306420 as cited in SEQ ID NO 53854

SEQ ID NO: 111645 - protein, 593 aa, Arabidopsis thaliana; identical to SEQ ID NO: 100406
  peptide (1)..(593): Ceres Seq. ID no. 13605052

SEQ ID NO: 111646 - protein, 565 aa, Arabidopsis thaliana; identical to SEQ ID NO: 100407
  peptide (1)..(565): Ceres Seq. ID no. 13605053

SEQ ID NO: 111647 - protein, 429 aa, Arabidopsis thaliana; identical to SEQ ID NO: 100408
  peptide (1)..(429): Ceres Seq. ID no. 13605054

SEQ ID NO: 111648 - DNA, 1324 bp, Arabidopsis thaliana; identical to SEQ ID NO: 100409
  misc_feature (1)..(1324): Ceres Seq. ID no. 13605059
  misc_feature (1)..(1324): Ortholog of  Ceres SEQ ID NO 14304475 as cited in SEQ ID NO 53438
  misc_feature (1)..(1324): Ortholog of  Ceres SEQ ID NO 15170555 as cited in SEQ ID NO 55313
  misc_feature (1)..(1324): Ortholog of  Ceres SEQ ID NO 15224695 as cited in SEQ ID NO 65418

SEQ ID NO: 111649 - protein, 382 aa, Arabidopsis thaliana; identical to SEQ ID NO: 26916
  peptide (1)..(382): Ceres Seq. ID no. 13605060

SEQ ID NO: 111650 - protein, 355 aa, Arabidopsis thaliana; identical to SEQ ID NO: 26917
  peptide (1)..(355): Ceres Seq. ID no. 13605061

SEQ ID NO: 111651 - protein, 334 aa, Arabidopsis thaliana; identical to SEQ ID NO: 26918
  peptide (1)..(334): Ceres Seq. ID no. 13605062

SEQ ID NO: 111652 - DNA, 914 bp, Arabidopsis thaliana; identical to SEQ ID NO: 100413
  misc_feature (1)..(914): Ceres Seq. ID no. 13605071
  misc_feature (1)..(914): Ortholog of  Ceres SEQ ID NO 14310398 as cited in SEQ ID NO 54260

SEQ ID NO: 111653 - protein, 275 aa, Arabidopsis thaliana; identical to SEQ ID NO: 100414
  peptide (1)..(275): Ceres Seq. ID no. 13605072

SEQ ID NO: 111654 - protein, 268 aa, Arabidopsis thaliana; identical to SEQ ID NO: 100415
  peptide (1)..(268): Ceres Seq. ID no. 13605073

SEQ ID NO: 111655 - DNA, 1734 bp, Arabidopsis thaliana; identical to SEQ ID NO: 100416
  misc_feature (1)..(1734): Ceres Seq. ID no. 13605074
  misc_feature (1)..(1734): Ortholog of  Ceres SEQ ID NO 14311870 as cited in SEQ ID NO 51574
  misc_feature (1)..(1734): Ortholog of  Ceres SEQ ID NO 15174583 as cited in SEQ ID NO 53693
  misc_feature (1)..(1734): Ortholog of  Ceres SEQ ID NO 13581563 as cited in SEQ ID NO 58942
  misc_feature (1)..(1734): Ortholog of  Ceres SEQ ID NO 13658707 as cited in SEQ ID NO 66286
  misc_feature (1)..(1734): Ortholog of  Ceres SEQ ID NO 13654528 as cited in SEQ ID NO 68080

SEQ ID NO: 111656 - protein, 475 aa, Arabidopsis thaliana; identical to SEQ ID NO: 100417
  peptide (1)..(475): Ceres Seq. ID no. 13605075

SEQ ID NO: 111657 - protein, 404 aa, Arabidopsis thaliana; identical to SEQ ID NO: 48503
  peptide (1)..(404): Ceres Seq. ID no. 13605076

SEQ ID NO: 111658 - protein, 283 aa, Arabidopsis thaliana; identical to SEQ ID NO: 48504
  peptide (1)..(283): Ceres Seq. ID no. 13605077

SEQ ID NO: 111659 - DNA, 1729 bp, Arabidopsis thaliana; identical to SEQ ID NO: 100420
  misc_feature (1)..(1729): Ceres Seq. ID no. 13605084
  misc_feature (1)..(1729): Ortholog of  Ceres SEQ ID NO 14313288 as cited in SEQ ID NO 67419

SEQ ID NO: 111660 - protein, 573 aa, Arabidopsis thaliana; identical to SEQ ID NO: 100421
  peptide (1)..(573): Ceres Seq. ID no. 13605085

SEQ ID NO: 111661 - protein, 570 aa, Arabidopsis thaliana; identical to SEQ ID NO: 100422
  peptide (1)..(570): Ceres Seq. ID no. 13605086

SEQ ID NO: 111662 - protein, 559 aa, Arabidopsis thaliana; identical to SEQ ID NO: 100423
  peptide (1)..(559): Ceres Seq. ID no. 13605087

SEQ ID NO: 111663 - DNA, 1405 bp, Arabidopsis thaliana; identical to SEQ ID NO: 100424
  misc_feature (1)..(1405): Ceres Seq. ID no. 13605096
  misc_feature (1)..(1405): Ortholog of  Ceres SEQ ID NO 15178909 as cited in SEQ ID NO 0

SEQ ID NO: 111664 - protein, 397 aa, Arabidopsis thaliana; identical to SEQ ID NO: 100425
  peptide (1)..(397): Ceres Seq. ID no. 13605097

SEQ ID NO: 111665 - protein, 329 aa, Arabidopsis thaliana; identical to SEQ ID NO: 100426
  peptide (1)..(329): Ceres Seq. ID no. 13605098

SEQ ID NO: 111666 - protein, 328 aa, Arabidopsis thaliana; identical to SEQ ID NO: 100427
  peptide (1)..(328): Ceres Seq. ID no. 13605099

SEQ ID NO: 111667 - DNA, 1353 bp, Arabidopsis thaliana; identical to SEQ ID NO: 100428
  misc_feature (1)..(1353): Ceres Seq. ID no. 13605104
  misc_feature (1)..(1353): Ortholog of  Ceres SEQ ID NO 14312320 as cited in SEQ ID NO 59385

SEQ ID NO: 111668 - protein, 382 aa, Arabidopsis thaliana; identical to SEQ ID NO: 100429
  peptide (1)..(382): Ceres Seq. ID no. 13605105

SEQ ID NO: 111669 - protein, 337 aa, Arabidopsis thaliana; identical to SEQ ID NO: 100430
  peptide (1)..(337): Ceres Seq. ID no. 13605106

SEQ ID NO: 111670 - protein, 334 aa, Arabidopsis thaliana; identical to SEQ ID NO: 100431
  peptide (1)..(334): Ceres Seq. ID no. 13605107

SEQ ID NO: 111671 - DNA, 1682 bp, Arabidopsis thaliana; identical to SEQ ID NO: 100432
  misc_feature (1)..(1682): Ceres Seq. ID no. 13605108
  misc_feature (1)..(1682): Ortholog of  Ceres SEQ ID NO 15179007 as cited in SEQ ID NO 1038
  misc_feature (1)..(1682): Ortholog of  Ceres SEQ ID NO 15226449 as cited in SEQ ID NO 58879
  misc_feature (1)..(1682): Ortholog of  Ceres SEQ ID NO 13597146 as cited in SEQ ID NO 63311

SEQ ID NO: 111672 - protein, 481 aa, Arabidopsis thaliana; identical to SEQ ID NO: 100433
  peptide (1)..(481): Ceres Seq. ID no. 13605109

SEQ ID NO: 111673 - protein, 436 aa, Arabidopsis thaliana; identical to SEQ ID NO: 100434
  peptide (1)..(436): Ceres Seq. ID no. 13605110

SEQ ID NO: 111674 - protein, 391 aa, Arabidopsis thaliana; identical to SEQ ID NO: 100435
  peptide (1)..(391): Ceres Seq. ID no. 13605111

SEQ ID NO: 111675 - DNA, 741 bp, Arabidopsis thaliana; identical to SEQ ID NO: 100436
  misc_feature (1)..(741): Ceres Seq. ID no. 13605128
  misc_feature (1)..(741): Ortholog of  Ceres SEQ ID NO 15175666 as cited in SEQ ID NO 54985
  misc_feature (1)..(741): Ortholog of  Ceres SEQ ID NO 14310460 as cited in SEQ ID NO 55105
  misc_feature (1)..(741): Ortholog of  Ceres SEQ ID NO 15179888 as cited in SEQ ID NO 66879
  misc_feature (1)..(741): Ortholog of  Ceres SEQ ID NO 13596056 as cited in SEQ ID NO 68307
  misc_feature (1)..(741): Ortholog of  Ceres SEQ ID NO 12388689 as cited in SEQ ID NO 0

SEQ ID NO: 111676 - protein, 246 aa, Arabidopsis thaliana; identical to SEQ ID NO: 100437
  peptide (1)..(246): Ceres Seq. ID no. 13605129

SEQ ID NO: 111677 - DNA, 1162 bp, Arabidopsis thaliana; identical to SEQ ID NO: 100438
  misc_feature (1)..(1162): Ceres Seq. ID no. 13605137
  misc_feature (1)..(1162): Ortholog of  Ceres SEQ ID NO 15169153 as cited in SEQ ID NO 56962

SEQ ID NO: 111678 - protein, 287 aa, Arabidopsis thaliana; identical to SEQ ID NO: 100439
  peptide (1)..(287): Ceres Seq. ID no. 13605138

SEQ ID NO: 111679 - protein, 216 aa, Arabidopsis thaliana; identical to SEQ ID NO: 100440
  peptide (1)..(216): Ceres Seq. ID no. 13605139

SEQ ID NO: 111680 - protein, 195 aa, Arabidopsis thaliana; identical to SEQ ID NO: 100441
  peptide (1)..(195): Ceres Seq. ID no. 13605140

SEQ ID NO: 111681 - DNA, 929 bp, Arabidopsis thaliana; identical to SEQ ID NO: 100442
  misc_feature (1)..(929): Ceres Seq. ID no. 13605144
  misc_feature (1)..(929): Ortholog of  Ceres SEQ ID NO 14306627 as cited in SEQ ID NO 53023
  misc_feature (1)..(929): Ortholog of  Ceres SEQ ID NO 15174917 as cited in SEQ ID NO 53650
  misc_feature (1)..(929): Ortholog of  Ceres SEQ ID NO 14304034 as cited in SEQ ID NO 53878
  misc_feature (1)..(929): Ortholog of  Ceres SEQ ID NO 14307559 as cited in SEQ ID NO 54006
  misc_feature (1)..(929): Ortholog of  Ceres SEQ ID NO 14307797 as cited in SEQ ID NO 54802
  misc_feature (1)..(929): Ortholog of  Ceres SEQ ID NO 15168374 as cited in SEQ ID NO 55652
  misc_feature (1)..(929): Ortholog of  Ceres SEQ ID NO 13663874 as cited in SEQ ID NO 67003

SEQ ID NO: 111682 - protein, 260 aa, Arabidopsis thaliana; identical to SEQ ID NO: 100443
  peptide (1)..(260): Ceres Seq. ID no. 13605145

SEQ ID NO: 111683 - protein, 250 aa, Arabidopsis thaliana; identical to SEQ ID NO: 100444
  peptide (1)..(250): Ceres Seq. ID no. 13605146

SEQ ID NO: 111684 - protein, 188 aa, Arabidopsis thaliana; identical to SEQ ID NO: 100445
  peptide (1)..(188): Ceres Seq. ID no. 13605147

SEQ ID NO: 111685 - DNA, 1605 bp, Arabidopsis thaliana; identical to SEQ ID NO: 100446
  misc_feature (1)..(1605): Ceres Seq. ID no. 13605148
  misc_feature (1)..(1605): Ortholog of  Ceres SEQ ID NO 13597647 as cited in SEQ ID NO 65258

SEQ ID NO: 111686 - protein, 343 aa, Arabidopsis thaliana; identical to SEQ ID NO: 100447
  peptide (1)..(343): Ceres Seq. ID no. 13605149

SEQ ID NO: 111687 - protein, 304 aa, Arabidopsis thaliana; identical to SEQ ID NO: 100448
  peptide (1)..(304): Ceres Seq. ID no. 13605150

SEQ ID NO: 111688 - protein, 281 aa, Arabidopsis thaliana; identical to SEQ ID NO: 100449
  peptide (1)..(281): Ceres Seq. ID no. 13605151

SEQ ID NO: 111689 - DNA, 863 bp, Arabidopsis thaliana; identical to SEQ ID NO: 100450
  misc_feature (1)..(863): Ceres Seq. ID no. 13605152
  misc_feature (1)..(863): Ortholog of  Ceres SEQ ID NO 15173284 as cited in SEQ ID NO 61828
  misc_feature (1)..(863): Ortholog of  Ceres SEQ ID NO 15178906 as cited in SEQ ID NO 0

SEQ ID NO: 111690 - protein, 168 aa, Arabidopsis thaliana; identical to SEQ ID NO: 100451
  peptide (1)..(168): Ceres Seq. ID no. 13605153

SEQ ID NO: 111691 - protein, 108 aa, Arabidopsis thaliana; identical to SEQ ID NO: 20850
  peptide (1)..(108): Ceres Seq. ID no. 13605154

SEQ ID NO: 111692 - DNA, 1103 bp, Arabidopsis thaliana; identical to SEQ ID NO: 100453
  misc_feature (1)..(1103): Ceres Seq. ID no. 13605159
  misc_feature (1)..(1103): Ortholog of  Ceres SEQ ID NO 13594740 as cited in SEQ ID NO 51721
  misc_feature (1)..(1103): Ortholog of  Ceres SEQ ID NO 14316497 as cited in SEQ ID NO 58285
  misc_feature (1)..(1103): Ortholog of  Ceres SEQ ID NO 13595944 as cited in SEQ ID NO 68153

SEQ ID NO: 111693 - protein, 345 aa, Arabidopsis thaliana; identical to SEQ ID NO: 21345
  peptide (1)..(345): Ceres Seq. ID no. 13605160

SEQ ID NO: 111694 - protein, 339 aa, Arabidopsis thaliana; identical to SEQ ID NO: 21346
  peptide (1)..(339): Ceres Seq. ID no. 13605161

SEQ ID NO: 111695 - protein, 326 aa, Arabidopsis thaliana; identical to SEQ ID NO: 21347
  peptide (1)..(326): Ceres Seq. ID no. 13605162

SEQ ID NO: 111696 - DNA, 1467 bp, Arabidopsis thaliana; identical to SEQ ID NO: 100457
  misc_feature (1)..(1467): Ceres Seq. ID no. 13605167
  misc_feature (1)..(1467): Ortholog of  Ceres SEQ ID NO 14316165 as cited in SEQ ID NO 52560
  misc_feature (1)..(1467): Ortholog of  Ceres SEQ ID NO 13597076 as cited in SEQ ID NO 63571

SEQ ID NO: 111697 - protein, 363 aa, Arabidopsis thaliana; identical to SEQ ID NO: 22211
  peptide (1)..(363): Ceres Seq. ID no. 13605168

SEQ ID NO: 111698 - protein, 285 aa, Arabidopsis thaliana; identical to SEQ ID NO: 22212
  peptide (1)..(285): Ceres Seq. ID no. 13605169

SEQ ID NO: 111699 - protein, 243 aa, Arabidopsis thaliana; identical to SEQ ID NO: 22213
  peptide (1)..(243): Ceres Seq. ID no. 13605170

SEQ ID NO: 111700 - DNA, 1305 bp, Arabidopsis thaliana; identical to SEQ ID NO: 100461
  misc_feature (1)..(1305): Ceres Seq. ID no. 13605175
  misc_feature (1)..(1305): Ortholog of  Ceres SEQ ID NO 14304871 as cited in SEQ ID NO 54194
  misc_feature (1)..(1305): Ortholog of  Ceres SEQ ID NO 13597751 as cited in SEQ ID NO 60721

SEQ ID NO: 111701 - protein, 350 aa, Arabidopsis thaliana; identical to SEQ ID NO: 27959
  peptide (1)..(350): Ceres Seq. ID no. 13605176

SEQ ID NO: 111702 - protein, 323 aa, Arabidopsis thaliana; identical to SEQ ID NO: 27960
  peptide (1)..(323): Ceres Seq. ID no. 13605177

SEQ ID NO: 111703 - protein, 296 aa, Arabidopsis thaliana; identical to SEQ ID NO: 27961
  peptide (1)..(296): Ceres Seq. ID no. 13605178

SEQ ID NO: 111704 - DNA, 1925 bp, Arabidopsis thaliana; identical to SEQ ID NO: 100465
  misc_feature (1)..(1925): Ceres Seq. ID no. 13605191
  misc_feature (1)..(1925): Ortholog of  Ceres SEQ ID NO 15226540 as cited in SEQ ID NO 58479
  misc_feature (1)..(1925): Ortholog of  Ceres SEQ ID NO 13596689 as cited in SEQ ID NO 62728
  misc_feature (1)..(1925): Ortholog of  Ceres SEQ ID NO 14302142 as cited in SEQ ID NO 0

SEQ ID NO: 111705 - protein, 390 aa, Arabidopsis thaliana; identical to SEQ ID NO: 40832
  peptide (1)..(390): Ceres Seq. ID no. 13605192

SEQ ID NO: 111706 - protein, 363 aa, Arabidopsis thaliana; identical to SEQ ID NO: 40833
  peptide (1)..(363): Ceres Seq. ID no. 13605193

SEQ ID NO: 111707 - protein, 357 aa, Arabidopsis thaliana; identical to SEQ ID NO: 40834
  peptide (1)..(357): Ceres Seq. ID no. 13605194

SEQ ID NO: 111708 - DNA, 1707 bp, Arabidopsis thaliana; identical to SEQ ID NO: 100469
  misc_feature (1)..(1707): Ceres Seq. ID no. 13605199
  misc_feature (1)..(1707): Ortholog of  Ceres SEQ ID NO 15226950 as cited in SEQ ID NO 68649
  misc_feature (1)..(1707): Ortholog of  Ceres SEQ ID NO 13502947 as cited in SEQ ID NO 69257

SEQ ID NO: 111709 - protein, 481 aa, Arabidopsis thaliana; identical to SEQ ID NO: 39599
  peptide (1)..(481): Ceres Seq. ID no. 13605200

SEQ ID NO: 111710 - protein, 465 aa, Arabidopsis thaliana; identical to SEQ ID NO: 39600
  peptide (1)..(465): Ceres Seq. ID no. 13605201

SEQ ID NO: 111711 - protein, 462 aa, Arabidopsis thaliana; identical to SEQ ID NO: 39601
  peptide (1)..(462): Ceres Seq. ID no. 13605202

SEQ ID NO: 111712 - DNA, 1022 bp, Arabidopsis thaliana; identical to SEQ ID NO: 100473
  misc_feature (1)..(1022): Ceres Seq. ID no. 13605207
  misc_feature (1)..(1022): Ortholog of  Ceres SEQ ID NO 13596163 as cited in SEQ ID NO 60864
  misc_feature (1)..(1022): Ortholog of  Ceres SEQ ID NO 15226347 as cited in SEQ ID NO 61639

SEQ ID NO: 111713 - protein, 222 aa, Arabidopsis thaliana; identical to SEQ ID NO: 100474
  peptide (1)..(222): Ceres Seq. ID no. 13605208

SEQ ID NO: 111714 - protein, 167 aa, Arabidopsis thaliana; identical to SEQ ID NO: 30816
  peptide (1)..(167): Ceres Seq. ID no. 13605209

SEQ ID NO: 111715 - protein, 117 aa, Arabidopsis thaliana; identical to SEQ ID NO: 30817
  peptide (1)..(117): Ceres Seq. ID no. 13605210

SEQ ID NO: 111716 - DNA, 868 bp, Arabidopsis thaliana; identical to SEQ ID NO: 100477
  misc_feature (1)..(868): Ceres Seq. ID no. 13605211
  misc_feature (1)..(868): Ortholog of  Ceres SEQ ID NO 12473977 as cited in SEQ ID NO 133
  misc_feature (1)..(868): Ortholog of  Ceres SEQ ID NO 15225932 as cited in SEQ ID NO 60016
  misc_feature (1)..(868): Ortholog of  Ceres SEQ ID NO 12585294 as cited in SEQ ID NO 63023

SEQ ID NO: 111717 - protein, 237 aa, Arabidopsis thaliana; identical to SEQ ID NO: 100478
  peptide (1)..(237): Ceres Seq. ID no. 13605212

SEQ ID NO: 111718 - protein, 214 aa, Arabidopsis thaliana; identical to SEQ ID NO: 100479
  peptide (1)..(214): Ceres Seq. ID no. 13605213

SEQ ID NO: 111719 - protein, 169 aa, Arabidopsis thaliana; identical to SEQ ID NO: 100480
  peptide (1)..(169): Ceres Seq. ID no. 13605214

SEQ ID NO: 111720 - DNA, 899 bp, Arabidopsis thaliana; identical to SEQ ID NO: 100481
  misc_feature (1)..(899): Ceres Seq. ID no. 13605225
  misc_feature (1)..(899): Ortholog of  Ceres SEQ ID NO 14315253 as cited in SEQ ID NO 52508
  misc_feature (1)..(899): Ortholog of  Ceres SEQ ID NO 12627566 as cited in SEQ ID NO 62753

SEQ ID NO: 111721 - protein, 173 aa, Arabidopsis thaliana; identical to SEQ ID NO: 89637
  peptide (1)..(173): Ceres Seq. ID no. 13605226

SEQ ID NO: 111722 - protein, 148 aa, Arabidopsis thaliana; identical to SEQ ID NO: 89638
  peptide (1)..(148): Ceres Seq. ID no. 13605227

SEQ ID NO: 111723 - protein, 142 aa, Arabidopsis thaliana; identical to SEQ ID NO: 89639
  peptide (1)..(142): Ceres Seq. ID no. 13605228

SEQ ID NO: 111724 - DNA, 578 bp, Arabidopsis thaliana; identical to SEQ ID NO: 100485
  misc_feature (1)..(578): Ceres Seq. ID no. 13605237
  misc_feature (1)..(578): Ortholog of  Ceres SEQ ID NO 15178359 as cited in SEQ ID NO 0

SEQ ID NO: 111725 - protein, 179 aa, Arabidopsis thaliana; identical to SEQ ID NO: 100486
  peptide (1)..(179): Ceres Seq. ID no. 13605238

SEQ ID NO: 111726 - protein, 175 aa, Arabidopsis thaliana; identical to SEQ ID NO: 100487
  peptide (1)..(175): Ceres Seq. ID no. 13605239

SEQ ID NO: 111727 - DNA, 618 bp, Arabidopsis thaliana; identical to SEQ ID NO: 100488
  misc_feature (1)..(618): Ceres Seq. ID no. 13605240
  misc_feature (1)..(618): Ortholog of  Ceres SEQ ID NO 13598157 as cited in SEQ ID NO 61570

SEQ ID NO: 111728 - protein, 127 aa, Arabidopsis thaliana; identical to SEQ ID NO: 43131
  peptide (1)..(127): Ceres Seq. ID no. 13605241

SEQ ID NO: 111729 - protein, 68 aa, Arabidopsis thaliana; identical to SEQ ID NO: 43132
  peptide (1)..(68): Ceres Seq. ID no. 13605242

SEQ ID NO: 111730 - DNA, 1119 bp, Arabidopsis thaliana; identical to SEQ ID NO: 100491
  misc_feature (1)..(1119): Ceres Seq. ID no. 13605246
  misc_feature (1)..(1119): Ortholog of  Ceres SEQ ID NO 14311579 as cited in SEQ ID NO 51717

SEQ ID NO: 111731 - protein, 335 aa, Arabidopsis thaliana; identical to SEQ ID NO: 100492
  peptide (1)..(335): Ceres Seq. ID no. 13605247

SEQ ID NO: 111732 - protein, 314 aa, Arabidopsis thaliana; identical to SEQ ID NO: 100493
  peptide (1)..(314): Ceres Seq. ID no. 13605248

SEQ ID NO: 111733 - protein, 295 aa, Arabidopsis thaliana; identical to SEQ ID NO: 100494
  peptide (1)..(295): Ceres Seq. ID no. 13605249

SEQ ID NO: 111734 - DNA, 1337 bp, Arabidopsis thaliana; identical to SEQ ID NO: 100495
  misc_feature (1)..(1337): Ceres Seq. ID no. 13605250
  misc_feature (1)..(1337): Ortholog of  Ceres SEQ ID NO 15168366 as cited in SEQ ID NO 60199

SEQ ID NO: 111735 - protein, 398 aa, Arabidopsis thaliana; identical to SEQ ID NO: 100496
  peptide (1)..(398): Ceres Seq. ID no. 13605251

SEQ ID NO: 111736 - protein, 366 aa, Arabidopsis thaliana; identical to SEQ ID NO: 100497
  peptide (1)..(366): Ceres Seq. ID no. 13605252

SEQ ID NO: 111737 - protein, 360 aa, Arabidopsis thaliana; identical to SEQ ID NO: 100498
  peptide (1)..(360): Ceres Seq. ID no. 13605253

SEQ ID NO: 111738 - DNA, 916 bp, Arabidopsis thaliana; identical to SEQ ID NO: 100499
  misc_feature (1)..(916): Ceres Seq. ID no. 13605258
  misc_feature (1)..(916): Ortholog of  Ceres SEQ ID NO 14309426 as cited in SEQ ID NO 0

SEQ ID NO: 111739 - protein, 187 aa, Arabidopsis thaliana; identical to SEQ ID NO: 100500
  peptide (1)..(187): Ceres Seq. ID no. 13605259

SEQ ID NO: 111740 - protein, 180 aa, Arabidopsis thaliana; identical to SEQ ID NO: 100501
  peptide (1)..(180): Ceres Seq. ID no. 13605260

SEQ ID NO: 111741 - protein, 170 aa, Arabidopsis thaliana; identical to SEQ ID NO: 100502
  peptide (1)..(170): Ceres Seq. ID no. 13605261

SEQ ID NO: 111742 - DNA, 2547 bp, Arabidopsis thaliana; identical to SEQ ID NO: 100503
  misc_feature (1)..(2547): Ceres Seq. ID no. 13605266
  misc_feature (1)..(2547): Ortholog of  Ceres SEQ ID NO 14310620 as cited in SEQ ID NO 53662

SEQ ID NO: 111743 - protein, 819 aa, Arabidopsis thaliana; identical to SEQ ID NO: 100504
  peptide (1)..(819): Ceres Seq. ID no. 13605267

SEQ ID NO: 111744 - protein, 750 aa, Arabidopsis thaliana; identical to SEQ ID NO: 100505
  peptide (1)..(750): Ceres Seq. ID no. 13605268

SEQ ID NO: 111745 - protein, 735 aa, Arabidopsis thaliana; identical to SEQ ID NO: 100506
  peptide (1)..(735): Ceres Seq. ID no. 13605269

SEQ ID NO: 111746 - DNA, 2124 bp, Arabidopsis thaliana; identical to SEQ ID NO: 100507
  misc_feature (1)..(2124): Ceres Seq. ID no. 13605272
  misc_feature (1)..(2124): Ortholog of  Ceres SEQ ID NO 14305409 as cited in SEQ ID NO 55679

SEQ ID NO: 111747 - protein, 637 aa, Arabidopsis thaliana; identical to SEQ ID NO: 100508
  peptide (1)..(637): Ceres Seq. ID no. 13605273

SEQ ID NO: 111748 - protein, 517 aa, Arabidopsis thaliana; identical to SEQ ID NO: 100509
  peptide (1)..(517): Ceres Seq. ID no. 13605274

SEQ ID NO: 111749 - protein, 492 aa, Arabidopsis thaliana; identical to SEQ ID NO: 100510
  peptide (1)..(492): Ceres Seq. ID no. 13605275

SEQ ID NO: 111750 - DNA, 1612 bp, Arabidopsis thaliana; identical to SEQ ID NO: 100511
  misc_feature (1)..(1612): Ceres Seq. ID no. 13605292
  misc_feature (1)..(1612): Ortholog of  Ceres SEQ ID NO 15176057 as cited in SEQ ID NO 56363
  misc_feature (1)..(1612): Ortholog of  Ceres SEQ ID NO 14316269 as cited in SEQ ID NO 60082

SEQ ID NO: 111751 - protein, 526 aa, Arabidopsis thaliana; identical to SEQ ID NO: 100512
  peptide (1)..(526): Ceres Seq. ID no. 13605293

SEQ ID NO: 111752 - protein, 396 aa, Arabidopsis thaliana; identical to SEQ ID NO: 100513
  peptide (1)..(396): Ceres Seq. ID no. 13605294

SEQ ID NO: 111753 - protein, 381 aa, Arabidopsis thaliana; identical to SEQ ID NO: 100514
  peptide (1)..(381): Ceres Seq. ID no. 13605295

SEQ ID NO: 111754 - DNA, 1447 bp, Arabidopsis thaliana; identical to SEQ ID NO: 100515
  misc_feature (1)..(1447): Ceres Seq. ID no. 13605312
  misc_feature (1)..(1447): Ortholog of  Ceres SEQ ID NO 12636774 as cited in SEQ ID NO 372
  misc_feature (1)..(1447): Ortholog of  Ceres SEQ ID NO 12578315 as cited in SEQ ID NO 62451
  misc_feature (1)..(1447): Ortholog of  Ceres SEQ ID NO 12617090 as cited in SEQ ID NO 64005
  misc_feature (1)..(1447): Ortholog of  Ceres SEQ ID NO 13597439 as cited in SEQ ID NO 64081
  misc_feature (1)..(1447): Ortholog of  Ceres SEQ ID NO 13597233 as cited in SEQ ID NO 64370
  misc_feature (1)..(1447): Ortholog of  Ceres SEQ ID NO 13584577 as cited in SEQ ID NO 65298

SEQ ID NO: 111755 - protein, 367 aa, Arabidopsis thaliana; identical to SEQ ID NO: 100516
  peptide (1)..(367): Ceres Seq. ID no. 13605313

SEQ ID NO: 111756 - protein, 361 aa, Arabidopsis thaliana; identical to SEQ ID NO: 100517
  peptide (1)..(361): Ceres Seq. ID no. 13605314

SEQ ID NO: 111757 - protein, 328 aa, Arabidopsis thaliana; identical to SEQ ID NO: 100518
  peptide (1)..(328): Ceres Seq. ID no. 13605315

SEQ ID NO: 111758 - DNA, 793 bp, Arabidopsis thaliana; identical to SEQ ID NO: 100519
  misc_feature (1)..(793): Ceres Seq. ID no. 13605316
  misc_feature (1)..(793): Ortholog of  Ceres SEQ ID NO 12609643 as cited in SEQ ID NO 51879

SEQ ID NO: 111759 - protein, 188 aa, Arabidopsis thaliana; identical to SEQ ID NO: 100520
  peptide (1)..(188): Ceres Seq. ID no. 13605317

SEQ ID NO: 111760 - protein, 158 aa, Arabidopsis thaliana; identical to SEQ ID NO: 100521
  peptide (1)..(158): Ceres Seq. ID no. 13605318

SEQ ID NO: 111761 - DNA, 1975 bp, Arabidopsis thaliana; identical to SEQ ID NO: 100522
  misc_feature (1)..(1975): Ceres Seq. ID no. 13605336
  misc_feature (1)..(1975): Ortholog of  Ceres SEQ ID NO 12578315 as cited in SEQ ID NO 62451
  misc_feature (1)..(1975): Ortholog of  Ceres SEQ ID NO 12615466 as cited in SEQ ID NO 62761
  misc_feature (1)..(1975): Ortholog of  Ceres SEQ ID NO 12617090 as cited in SEQ ID NO 64005
  misc_feature (1)..(1975): Ortholog of  Ceres SEQ ID NO 13597233 as cited in SEQ ID NO 64370
  misc_feature (1)..(1975): Ortholog of  Ceres SEQ ID NO 13584577 as cited in SEQ ID NO 65298

SEQ ID NO: 111762 - protein, 353 aa, Arabidopsis thaliana; identical to SEQ ID NO: 100523
  peptide (1)..(353): Ceres Seq. ID no. 13605337

SEQ ID NO: 111763 - protein, 345 aa, Arabidopsis thaliana; identical to SEQ ID NO: 100524
  peptide (1)..(345): Ceres Seq. ID no. 13605338

SEQ ID NO: 111764 - protein, 206 aa, Arabidopsis thaliana; identical to SEQ ID NO: 100525
  peptide (1)..(206): Ceres Seq. ID no. 13605339

SEQ ID NO: 111765 - DNA, 2079 bp, Arabidopsis thaliana; identical to SEQ ID NO: 100526
  misc_feature (1)..(2079): Ceres Seq. ID no. 13605340
  misc_feature (1)..(2079): Ortholog of  Ceres SEQ ID NO 13595900 as cited in SEQ ID NO 69289

SEQ ID NO: 111766 - protein, 468 aa, Arabidopsis thaliana; identical to SEQ ID NO: 100527
  peptide (1)..(468): Ceres Seq. ID no. 13605341

SEQ ID NO: 111767 - protein, 412 aa, Arabidopsis thaliana; identical to SEQ ID NO: 100528
  peptide (1)..(412): Ceres Seq. ID no. 13605342

SEQ ID NO: 111768 - protein, 389 aa, Arabidopsis thaliana; identical to SEQ ID NO: 100529
  peptide (1)..(389): Ceres Seq. ID no. 13605343

SEQ ID NO: 111769 - DNA, 1512 bp, Arabidopsis thaliana; identical to SEQ ID NO: 100530
  misc_feature (1)..(1512): Ceres Seq. ID no. 13605356
  misc_feature (1)..(1512): Ortholog of  Ceres SEQ ID NO 15172274 as cited in SEQ ID NO 59703

SEQ ID NO: 111770 - protein, 393 aa, Arabidopsis thaliana; identical to SEQ ID NO: 43463
  peptide (1)..(393): Ceres Seq. ID no. 13605357

SEQ ID NO: 111771 - protein, 367 aa, Arabidopsis thaliana; identical to SEQ ID NO: 43464
  peptide (1)..(367): Ceres Seq. ID no. 13605358

SEQ ID NO: 111772 - protein, 336 aa, Arabidopsis thaliana; identical to SEQ ID NO: 43465
  peptide (1)..(336): Ceres Seq. ID no. 13605359

SEQ ID NO: 111773 - DNA, 1583 bp, Arabidopsis thaliana; identical to SEQ ID NO: 100534
  misc_feature (1)..(1583): Ceres Seq. ID no. 13605360
  misc_feature (1)..(1583): Ortholog of  Ceres SEQ ID NO 13600220 as cited in SEQ ID NO 0

SEQ ID NO: 111774 - protein, 526 aa, Arabidopsis thaliana; identical to SEQ ID NO: 100535
  peptide (1)..(526): Ceres Seq. ID no. 13605361

SEQ ID NO: 111775 - protein, 516 aa, Arabidopsis thaliana; identical to SEQ ID NO: 100536
  peptide (1)..(516): Ceres Seq. ID no. 13605362

SEQ ID NO: 111776 - protein, 425 aa, Arabidopsis thaliana; identical to SEQ ID NO: 100537
  peptide (1)..(425): Ceres Seq. ID no. 13605363

SEQ ID NO: 111777 - DNA, 890 bp, Arabidopsis thaliana; identical to SEQ ID NO: 100538
  misc_feature (1)..(890): Ceres Seq. ID no. 13605389
  misc_feature (1)..(890): Ortholog of  Ceres SEQ ID NO 13624427 as cited in SEQ ID NO 0

SEQ ID NO: 111778 - protein, 246 aa, Arabidopsis thaliana; identical to SEQ ID NO: 100539
  peptide (1)..(246): Ceres Seq. ID no. 13605390

SEQ ID NO: 111779 - protein, 227 aa, Arabidopsis thaliana; identical to SEQ ID NO: 100540
  peptide (1)..(227): Ceres Seq. ID no. 13605391

SEQ ID NO: 111780 - DNA, 1759 bp, Arabidopsis thaliana; identical to SEQ ID NO: 100541
  misc_feature (1)..(1759): Ceres Seq. ID no. 13605392
  misc_feature (1)..(1759): Ortholog of  Ceres SEQ ID NO 13599324 as cited in SEQ ID NO 0

SEQ ID NO: 111781 - protein, 521 aa, Arabidopsis thaliana; identical to SEQ ID NO: 100542
  peptide (1)..(521): Ceres Seq. ID no. 13605393

SEQ ID NO: 111782 - protein, 513 aa, Arabidopsis thaliana; identical to SEQ ID NO: 100543
  peptide (1)..(513): Ceres Seq. ID no. 13605394

SEQ ID NO: 111783 - protein, 298 aa, Arabidopsis thaliana; identical to SEQ ID NO: 100544
  peptide (1)..(298): Ceres Seq. ID no. 13605395

SEQ ID NO: 111784 - DNA, 1774 bp, Arabidopsis thaliana; identical to SEQ ID NO: 100545
  misc_feature (1)..(1774): Ceres Seq. ID no. 13605426
  misc_feature (1)..(1774): Ortholog of  Ceres SEQ ID NO 13648571 as cited in SEQ ID NO 197

SEQ ID NO: 111785 - protein, 550 aa, Arabidopsis thaliana; identical to SEQ ID NO: 71567
  peptide (1)..(550): Ceres Seq. ID no. 13605427

SEQ ID NO: 111786 - protein, 479 aa, Arabidopsis thaliana; identical to SEQ ID NO: 71568
  peptide (1)..(479): Ceres Seq. ID no. 13605428

SEQ ID NO: 111787 - protein, 440 aa, Arabidopsis thaliana; identical to SEQ ID NO: 71569
  peptide (1)..(440): Ceres Seq. ID no. 13605429

SEQ ID NO: 111788 - DNA, 2313 bp, Arabidopsis thaliana; identical to SEQ ID NO: 100549
  misc_feature (1)..(2313): Ceres Seq. ID no. 13605437
  misc_feature (1)..(2313): Ortholog of  Ceres SEQ ID NO 13595658 as cited in SEQ ID NO 59888
  misc_feature (1)..(2313): Ortholog of  Ceres SEQ ID NO 13661330 as cited in SEQ ID NO 61614
  misc_feature (1)..(2313): Ortholog of  Ceres SEQ ID NO 13596025 as cited in SEQ ID NO 62024
  misc_feature (1)..(2313): Ortholog of  Ceres SEQ ID NO 13662324 as cited in SEQ ID NO 62162
  misc_feature (1)..(2313): Ortholog of  Ceres SEQ ID NO 12625713 as cited in SEQ ID NO 64160

SEQ ID NO: 111789 - protein, 665 aa, Arabidopsis thaliana; identical to SEQ ID NO: 100550
  peptide (1)..(665): Ceres Seq. ID no. 13605438

SEQ ID NO: 111790 - protein, 656 aa, Arabidopsis thaliana; identical to SEQ ID NO: 100551
  peptide (1)..(656): Ceres Seq. ID no. 13605439

SEQ ID NO: 111791 - protein, 643 aa, Arabidopsis thaliana; identical to SEQ ID NO: 100552
  peptide (1)..(643): Ceres Seq. ID no. 13605440

SEQ ID NO: 111792 - DNA, 932 bp, Arabidopsis thaliana; identical to SEQ ID NO: 100553
  misc_feature (1)..(932): Ceres Seq. ID no. 13605445
  misc_feature (1)..(932): Ortholog of  Ceres SEQ ID NO 13596519 as cited in SEQ ID NO 62572
  misc_feature (1)..(932): Ortholog of  Ceres SEQ ID NO 12625108 as cited in SEQ ID NO 68102

SEQ ID NO: 111793 - protein, 276 aa, Arabidopsis thaliana; identical to SEQ ID NO: 100554
  peptide (1)..(276): Ceres Seq. ID no. 13605446

SEQ ID NO: 111794 - protein, 262 aa, Arabidopsis thaliana; identical to SEQ ID NO: 100555
  peptide (1)..(262): Ceres Seq. ID no. 13605447

SEQ ID NO: 111795 - protein, 256 aa, Arabidopsis thaliana; identical to SEQ ID NO: 100556
  peptide (1)..(256): Ceres Seq. ID no. 13605448

SEQ ID NO: 111796 - DNA, 1302 bp, Arabidopsis thaliana; identical to SEQ ID NO: 100557
  misc_feature (1)..(1302): Ceres Seq. ID no. 13605449
  misc_feature (1)..(1302): Ortholog of  Ceres SEQ ID NO 13594301 as cited in SEQ ID NO 60110

SEQ ID NO: 111797 - protein, 249 aa, Arabidopsis thaliana; identical to SEQ ID NO: 100558
  peptide (1)..(249): Ceres Seq. ID no. 13605450

SEQ ID NO: 111798 - protein, 220 aa, Arabidopsis thaliana; identical to SEQ ID NO: 100559
  peptide (1)..(220): Ceres Seq. ID no. 13605451

SEQ ID NO: 111799 - protein, 179 aa, Arabidopsis thaliana; identical to SEQ ID NO: 100560
  peptide (1)..(179): Ceres Seq. ID no. 13605452

SEQ ID NO: 111800 - DNA, 1471 bp, Arabidopsis thaliana; identical to SEQ ID NO: 100561
  misc_feature (1)..(1471): Ceres Seq. ID no. 13605464
  misc_feature (1)..(1471): Ortholog of  Ceres SEQ ID NO 13596392 as cited in SEQ ID NO 62136
  misc_feature (1)..(1471): Ortholog of  Ceres SEQ ID NO 14313244 as cited in SEQ ID NO 66802
  misc_feature (1)..(1471): Ortholog of  Ceres SEQ ID NO 13654360 as cited in SEQ ID NO 67980
  misc_feature (1)..(1471): Ortholog of  Ceres SEQ ID NO 13596394 as cited in SEQ ID NO 68561

SEQ ID NO: 111801 - protein, 305 aa, Arabidopsis thaliana; identical to SEQ ID NO: 100562
  peptide (1)..(305): Ceres Seq. ID no. 13605465

SEQ ID NO: 111802 - protein, 276 aa, Arabidopsis thaliana; identical to SEQ ID NO: 100563
  peptide (1)..(276): Ceres Seq. ID no. 13605466

SEQ ID NO: 111803 - protein, 247 aa, Arabidopsis thaliana; identical to SEQ ID NO: 100564
  peptide (1)..(247): Ceres Seq. ID no. 13605467

SEQ ID NO: 111804 - DNA, 1008 bp, Arabidopsis thaliana; identical to SEQ ID NO: 100565
  misc_feature (1)..(1008): Ceres Seq. ID no. 13605487
  misc_feature (1)..(1008): Ortholog of  Ceres SEQ ID NO 12611159 as cited in SEQ ID NO 59821

SEQ ID NO: 111805 - protein, 249 aa, Arabidopsis thaliana; identical to SEQ ID NO: 100566
  peptide (1)..(249): Ceres Seq. ID no. 13605488

SEQ ID NO: 111806 - protein, 248 aa, Arabidopsis thaliana; identical to SEQ ID NO: 100567
  peptide (1)..(248): Ceres Seq. ID no. 13605489

SEQ ID NO: 111807 - protein, 229 aa, Arabidopsis thaliana; identical to SEQ ID NO: 100568
  peptide (1)..(229): Ceres Seq. ID no. 13605490

SEQ ID NO: 111808 - DNA, 1911 bp, Arabidopsis thaliana; identical to SEQ ID NO: 100569
  misc_feature (1)..(1911): Ceres Seq. ID no. 13605495
  misc_feature (1)..(1911): Ortholog of  Ceres SEQ ID NO 15176532 as cited in SEQ ID NO 58184
  misc_feature (1)..(1911): Ortholog of  Ceres SEQ ID NO 13597546 as cited in SEQ ID NO 65017
  misc_feature (1)..(1911): Ortholog of  Ceres SEQ ID NO 14308015 as cited in SEQ ID NO 65798
  misc_feature (1)..(1911): Ortholog of  Ceres SEQ ID NO 14307908 as cited in SEQ ID NO 67189
  misc_feature (1)..(1911): Ortholog of  Ceres SEQ ID NO 13654353 as cited in SEQ ID NO 68318

SEQ ID NO: 111809 - protein, 491 aa, Arabidopsis thaliana; identical to SEQ ID NO: 100570
  peptide (1)..(491): Ceres Seq. ID no. 13605496

SEQ ID NO: 111810 - protein, 412 aa, Arabidopsis thaliana; identical to SEQ ID NO: 100571
  peptide (1)..(412): Ceres Seq. ID no. 13605497

SEQ ID NO: 111811 - protein, 406 aa, Arabidopsis thaliana; identical to SEQ ID NO: 100572
  peptide (1)..(406): Ceres Seq. ID no. 13605498

SEQ ID NO: 111812 - DNA, 1428 bp, Arabidopsis thaliana; identical to SEQ ID NO: 100573
  misc_feature (1)..(1428): Ceres Seq. ID no. 13605509
  misc_feature (1)..(1428): Ortholog of  Ceres SEQ ID NO 15178909 as cited in SEQ ID NO 0

SEQ ID NO: 111813 - protein, 445 aa, Arabidopsis thaliana; identical to SEQ ID NO: 84205
  peptide (1)..(445): Ceres Seq. ID no. 13605510

SEQ ID NO: 111814 - protein, 428 aa, Arabidopsis thaliana; identical to SEQ ID NO: 84206
  peptide (1)..(428): Ceres Seq. ID no. 13605511

SEQ ID NO: 111815 - protein, 230 aa, Arabidopsis thaliana; identical to SEQ ID NO: 84207
  peptide (1)..(230): Ceres Seq. ID no. 13605512

SEQ ID NO: 111816 - DNA, 1340 bp, Arabidopsis thaliana; identical to SEQ ID NO: 100577
  misc_feature (1)..(1340): Ceres Seq. ID no. 13605513
  misc_feature (1)..(1340): Ortholog of  Ceres SEQ ID NO 15171293 as cited in SEQ ID NO 51744

SEQ ID NO: 111817 - protein, 363 aa, Arabidopsis thaliana; identical to SEQ ID NO: 41959
  peptide (1)..(363): Ceres Seq. ID no. 13605514

SEQ ID NO: 111818 - protein, 343 aa, Arabidopsis thaliana; identical to SEQ ID NO: 41960
  peptide (1)..(343): Ceres Seq. ID no. 13605515

SEQ ID NO: 111819 - protein, 317 aa, Arabidopsis thaliana; identical to SEQ ID NO: 41961
  peptide (1)..(317): Ceres Seq. ID no. 13605516

SEQ ID NO: 111820 - DNA, 1854 bp, Arabidopsis thaliana; identical to SEQ ID NO: 100581
  misc_feature (1)..(1854): Ceres Seq. ID no. 13605517
  misc_feature (1)..(1854): Ortholog of  Ceres SEQ ID NO 14314359 as cited in SEQ ID NO 51039
  misc_feature (1)..(1854): Ortholog of  Ceres SEQ ID NO 14316184 as cited in SEQ ID NO 54517
  misc_feature (1)..(1854): Ortholog of  Ceres SEQ ID NO 15226529 as cited in SEQ ID NO 55005
  misc_feature (1)..(1854): Ortholog of  Ceres SEQ ID NO 12616225 as cited in SEQ ID NO 68930

SEQ ID NO: 111821 - protein, 471 aa, Arabidopsis thaliana; identical to SEQ ID NO: 100582
  peptide (1)..(471): Ceres Seq. ID no. 13605518

SEQ ID NO: 111822 - protein, 445 aa, Arabidopsis thaliana; identical to SEQ ID NO: 100583
  peptide (1)..(445): Ceres Seq. ID no. 13605519

SEQ ID NO: 111823 - protein, 391 aa, Arabidopsis thaliana; identical to SEQ ID NO: 100584
  peptide (1)..(391): Ceres Seq. ID no. 13605520

SEQ ID NO: 111824 - DNA, 867 bp, Arabidopsis thaliana; identical to SEQ ID NO: 100585
  misc_feature (1)..(867): Ceres Seq. ID no. 13605521
  misc_feature (1)..(867): Ortholog of  Ceres SEQ ID NO 15175034 as cited in SEQ ID NO 62432
  misc_feature (1)..(867): Ortholog of  Ceres SEQ ID NO 12619999 as cited in SEQ ID NO 66123
  misc_feature (1)..(867): Ortholog of  Ceres SEQ ID NO 13656436 as cited in SEQ ID NO 69154

SEQ ID NO: 111825 - protein, 217 aa, Arabidopsis thaliana; identical to SEQ ID NO: 100586
  peptide (1)..(217): Ceres Seq. ID no. 13605522

SEQ ID NO: 111826 - DNA, 693 bp, Arabidopsis thaliana; identical to SEQ ID NO: 100587
  misc_feature (1)..(693): Ceres Seq. ID no. 13605535
  misc_feature (1)..(693): Ortholog of  Ceres SEQ ID NO 12557420 as cited in SEQ ID NO 15
  misc_feature (1)..(693): Ortholog of  Ceres SEQ ID NO 15224673 as cited in SEQ ID NO 0
  misc_feature (1)..(693): Ortholog of  Ceres SEQ ID NO 15227157 as cited in SEQ ID NO 0

SEQ ID NO: 111827 - protein, 151 aa, Arabidopsis thaliana; identical to SEQ ID NO: 100588
  peptide (1)..(151): Ceres Seq. ID no. 13605536

SEQ ID NO: 111828 - protein, 143 aa, Arabidopsis thaliana; identical to SEQ ID NO: 100589
  peptide (1)..(143): Ceres Seq. ID no. 13605537

SEQ ID NO: 111829 - protein, 141 aa, Arabidopsis thaliana; identical to SEQ ID NO: 100590
  peptide (1)..(141): Ceres Seq. ID no. 13605538

SEQ ID NO: 111830 - DNA, 1097 bp, Arabidopsis thaliana; identical to SEQ ID NO: 100591
  misc_feature (1)..(1097): Ceres Seq. ID no. 13605565
  misc_feature (1)..(1097): Ortholog of  Ceres SEQ ID NO 12578315 as cited in SEQ ID NO 62451
  misc_feature (1)..(1097): Ortholog of  Ceres SEQ ID NO 12617090 as cited in SEQ ID NO 64005
  misc_feature (1)..(1097): Ortholog of  Ceres SEQ ID NO 13597233 as cited in SEQ ID NO 64370
  misc_feature (1)..(1097): Ortholog of  Ceres SEQ ID NO 13584577 as cited in SEQ ID NO 65298

SEQ ID NO: 111831 - protein, 364 aa, Arabidopsis thaliana; identical to SEQ ID NO: 100592
  peptide (1)..(364): Ceres Seq. ID no. 13605566

SEQ ID NO: 111832 - protein, 359 aa, Arabidopsis thaliana; identical to SEQ ID NO: 100593
  peptide (1)..(359): Ceres Seq. ID no. 13605567

SEQ ID NO: 111833 - protein, 257 aa, Arabidopsis thaliana; identical to SEQ ID NO: 100594
  peptide (1)..(257): Ceres Seq. ID no. 13605568

SEQ ID NO: 111834 - DNA, 1292 bp, Arabidopsis thaliana; identical to SEQ ID NO: 100595
  misc_feature (1)..(1292): Ceres Seq. ID no. 13605569
  misc_feature (1)..(1292): Ortholog of  Ceres SEQ ID NO 12636774 as cited in SEQ ID NO 372
  misc_feature (1)..(1292): Ortholog of  Ceres SEQ ID NO 12578315 as cited in SEQ ID NO 62451
  misc_feature (1)..(1292): Ortholog of  Ceres SEQ ID NO 12615466 as cited in SEQ ID NO 62761
  misc_feature (1)..(1292): Ortholog of  Ceres SEQ ID NO 13597295 as cited in SEQ ID NO 63743
  misc_feature (1)..(1292): Ortholog of  Ceres SEQ ID NO 12617090 as cited in SEQ ID NO 64005
  misc_feature (1)..(1292): Ortholog of  Ceres SEQ ID NO 13597439 as cited in SEQ ID NO 64081
  misc_feature (1)..(1292): Ortholog of  Ceres SEQ ID NO 13597233 as cited in SEQ ID NO 64370
  misc_feature (1)..(1292): Ortholog of  Ceres SEQ ID NO 13584577 as cited in SEQ ID NO 65298
  misc_feature (1)..(1292): Ortholog of  Ceres SEQ ID NO 13599438 as cited in SEQ ID NO 0

SEQ ID NO: 111835 - protein, 376 aa, Arabidopsis thaliana; identical to SEQ ID NO: 23901
  peptide (1)..(376): Ceres Seq. ID no. 13605570

SEQ ID NO: 111836 - protein, 369 aa, Arabidopsis thaliana; identical to SEQ ID NO: 23902
  peptide (1)..(369): Ceres Seq. ID no. 13605571

SEQ ID NO: 111837 - protein, 258 aa, Arabidopsis thaliana; identical to SEQ ID NO: 23903
  peptide (1)..(258): Ceres Seq. ID no. 13605572

SEQ ID NO: 111838 - DNA, 1581 bp, Arabidopsis thaliana; identical to SEQ ID NO: 100599
  misc_feature (1)..(1581): Ceres Seq. ID no. 13605573
  misc_feature (1)..(1581): Ortholog of  Ceres SEQ ID NO 13597574 as cited in SEQ ID NO 64677
  misc_feature (1)..(1581): Ortholog of  Ceres SEQ ID NO 13597843 as cited in SEQ ID NO 64850
  misc_feature (1)..(1581): Ortholog of  Ceres SEQ ID NO 13597678 as cited in SEQ ID NO 65375
  misc_feature (1)..(1581): Ortholog of  Ceres SEQ ID NO 13596180 as cited in SEQ ID NO 67941
  misc_feature (1)..(1581): Ortholog of  Ceres SEQ ID NO 13591190 as cited in SEQ ID NO 68044
  misc_feature (1)..(1581): Ortholog of  Ceres SEQ ID NO 13595961 as cited in SEQ ID NO 68223

SEQ ID NO: 111839 - protein, 480 aa, Arabidopsis thaliana; identical to SEQ ID NO: 27630
  peptide (1)..(480): Ceres Seq. ID no. 13605574

SEQ ID NO: 111840 - protein, 445 aa, Arabidopsis thaliana; identical to SEQ ID NO: 27631
  peptide (1)..(445): Ceres Seq. ID no. 13605575

SEQ ID NO: 111841 - protein, 439 aa, Arabidopsis thaliana; identical to SEQ ID NO: 100602
  peptide (1)..(439): Ceres Seq. ID no. 13605576

SEQ ID NO: 111842 - DNA, 1685 bp, Arabidopsis thaliana; identical to SEQ ID NO: 100603
  misc_feature (1)..(1685): Ceres Seq. ID no. 13605584
  misc_feature (1)..(1685): Ortholog of  Ceres SEQ ID NO 14302875 as cited in SEQ ID NO 66242
  misc_feature (1)..(1685): Ortholog of  Ceres SEQ ID NO 13660287 as cited in SEQ ID NO 67316

SEQ ID NO: 111843 - protein, 509 aa, Arabidopsis thaliana; identical to SEQ ID NO: 100604
  peptide (1)..(509): Ceres Seq. ID no. 13605585

SEQ ID NO: 111844 - protein, 502 aa, Arabidopsis thaliana; identical to SEQ ID NO: 100605
  peptide (1)..(502): Ceres Seq. ID no. 13605586

SEQ ID NO: 111845 - protein, 483 aa, Arabidopsis thaliana; identical to SEQ ID NO: 100606
  peptide (1)..(483): Ceres Seq. ID no. 13605587

SEQ ID NO: 111846 - DNA, 872 bp, Arabidopsis thaliana; identical to SEQ ID NO: 100607
  misc_feature (1)..(872): Ceres Seq. ID no. 13605599
  misc_feature (1)..(872): Ortholog of  Ceres SEQ ID NO 12609037 as cited in SEQ ID NO 51306
  misc_feature (1)..(872): Ortholog of  Ceres SEQ ID NO 12610391 as cited in SEQ ID NO 55942
  misc_feature (1)..(872): Ortholog of  Ceres SEQ ID NO 14309068 as cited in SEQ ID NO 0

SEQ ID NO: 111847 - protein, 243 aa, Arabidopsis thaliana; identical to SEQ ID NO: 38446
  peptide (1)..(243): Ceres Seq. ID no. 13605600

SEQ ID NO: 111848 - protein, 235 aa, Arabidopsis thaliana; identical to SEQ ID NO: 38447
  peptide (1)..(235): Ceres Seq. ID no. 13605601

SEQ ID NO: 111849 - protein, 134 aa, Arabidopsis thaliana; identical to SEQ ID NO: 38448
  peptide (1)..(134): Ceres Seq. ID no. 13605602

SEQ ID NO: 111850 - DNA, 2261 bp, Arabidopsis thaliana; identical to SEQ ID NO: 100611
  misc_feature (1)..(2261): Ceres Seq. ID no. 13605611
  misc_feature (1)..(2261): Ortholog of  Ceres SEQ ID NO 15176963 as cited in SEQ ID NO 52894

SEQ ID NO: 111851 - protein, 678 aa, Arabidopsis thaliana; identical to SEQ ID NO: 100612
  peptide (1)..(678): Ceres Seq. ID no. 13605612

SEQ ID NO: 111852 - protein, 677 aa, Arabidopsis thaliana; identical to SEQ ID NO: 100613
  peptide (1)..(677): Ceres Seq. ID no. 13605613

SEQ ID NO: 111853 - protein, 586 aa, Arabidopsis thaliana; identical to SEQ ID NO: 100614
  peptide (1)..(586): Ceres Seq. ID no. 13605614

SEQ ID NO: 111854 - DNA, 785 bp, Arabidopsis thaliana; identical to SEQ ID NO: 100615
  misc_feature (1)..(785): Ceres Seq. ID no. 13605623
  misc_feature (1)..(785): Ortholog of  Ceres SEQ ID NO 14311693 as cited in SEQ ID NO 51239
  misc_feature (1)..(785): Ortholog of  Ceres SEQ ID NO 13661954 as cited in SEQ ID NO 61182

SEQ ID NO: 111855 - protein, 191 aa, Arabidopsis thaliana; identical to SEQ ID NO: 100616
  peptide (1)..(191): Ceres Seq. ID no. 13605624

SEQ ID NO: 111856 - DNA, 2983 bp, Arabidopsis thaliana; identical to SEQ ID NO: 100617
  misc_feature (1)..(2983): Ceres Seq. ID no. 13605633
  misc_feature (1)..(2983): Ortholog of  Ceres SEQ ID NO 13582534 as cited in SEQ ID NO 57409

SEQ ID NO: 111857 - protein, 850 aa, Arabidopsis thaliana; identical to SEQ ID NO: 100618
  peptide (1)..(850): Ceres Seq. ID no. 13605634

SEQ ID NO: 111858 - protein, 684 aa, Arabidopsis thaliana; identical to SEQ ID NO: 100619
  peptide (1)..(684): Ceres Seq. ID no. 13605635

SEQ ID NO: 111859 - protein, 635 aa, Arabidopsis thaliana; identical to SEQ ID NO: 100620
  peptide (1)..(635): Ceres Seq. ID no. 13605636

SEQ ID NO: 111860 - DNA, 1796 bp, Arabidopsis thaliana; identical to SEQ ID NO: 100621
  misc_feature (1)..(1796): Ceres Seq. ID no. 13605637
  misc_feature (1)..(1796): Ortholog of  Ceres SEQ ID NO 14309674 as cited in SEQ ID NO 55707
  misc_feature (1)..(1796): Ortholog of  Ceres SEQ ID NO 13658728 as cited in SEQ ID NO 66270
  misc_feature (1)..(1796): Ortholog of  Ceres SEQ ID NO 12465428 as cited in SEQ ID NO 68898

SEQ ID NO: 111861 - protein, 492 aa, Arabidopsis thaliana; identical to SEQ ID NO: 100622
  peptide (1)..(492): Ceres Seq. ID no. 13605638

SEQ ID NO: 111862 - protein, 410 aa, Arabidopsis thaliana; identical to SEQ ID NO: 100623
  peptide (1)..(410): Ceres Seq. ID no. 13605639

SEQ ID NO: 111863 - protein, 341 aa, Arabidopsis thaliana; identical to SEQ ID NO: 100624
  peptide (1)..(341): Ceres Seq. ID no. 13605640

SEQ ID NO: 111864 - DNA, 1277 bp, Arabidopsis thaliana; identical to SEQ ID NO: 100625
  misc_feature (1)..(1277): Ceres Seq. ID no. 13605667
  misc_feature (1)..(1277): Ortholog of  Ceres SEQ ID NO 14304176 as cited in SEQ ID NO 56343

SEQ ID NO: 111865 - protein, 324 aa, Arabidopsis thaliana; identical to SEQ ID NO: 100626
  peptide (1)..(324): Ceres Seq. ID no. 13605668

SEQ ID NO: 111866 - protein, 266 aa, Arabidopsis thaliana; identical to SEQ ID NO: 100627
  peptide (1)..(266): Ceres Seq. ID no. 13605669

SEQ ID NO: 111867 - protein, 171 aa, Arabidopsis thaliana; identical to SEQ ID NO: 100628
  peptide (1)..(171): Ceres Seq. ID no. 13605670

SEQ ID NO: 111868 - DNA, 2115 bp, Arabidopsis thaliana; identical to SEQ ID NO: 100629
  misc_feature (1)..(2115): Ceres Seq. ID no. 13605671
  misc_feature (1)..(2115): Ortholog of  Ceres SEQ ID NO 12465083 as cited in SEQ ID NO 68239

SEQ ID NO: 111869 - protein, 690 aa, Arabidopsis thaliana; identical to SEQ ID NO: 100630
  peptide (1)..(690): Ceres Seq. ID no. 13605672

SEQ ID NO: 111870 - protein, 678 aa, Arabidopsis thaliana; identical to SEQ ID NO: 100631
  peptide (1)..(678): Ceres Seq. ID no. 13605673

SEQ ID NO: 111871 - protein, 668 aa, Arabidopsis thaliana; identical to SEQ ID NO: 100632
  peptide (1)..(668): Ceres Seq. ID no. 13605674

SEQ ID NO: 111872 - DNA, 1421 bp, Arabidopsis thaliana; identical to SEQ ID NO: 100633
  misc_feature (1)..(1421): Ceres Seq. ID no. 13605684
  misc_feature (1)..(1421): Ortholog of  Ceres SEQ ID NO 13597574 as cited in SEQ ID NO 64677
  misc_feature (1)..(1421): Ortholog of  Ceres SEQ ID NO 12617417 as cited in SEQ ID NO 65089
  misc_feature (1)..(1421): Ortholog of  Ceres SEQ ID NO 13597678 as cited in SEQ ID NO 65375
  misc_feature (1)..(1421): Ortholog of  Ceres SEQ ID NO 12779098 as cited in SEQ ID NO 67698
  misc_feature (1)..(1421): Ortholog of  Ceres SEQ ID NO 13596180 as cited in SEQ ID NO 67941
  misc_feature (1)..(1421): Ortholog of  Ceres SEQ ID NO 13591190 as cited in SEQ ID NO 68044
  misc_feature (1)..(1421): Ortholog of  Ceres SEQ ID NO 13595961 as cited in SEQ ID NO 68223
  misc_feature (1)..(1421): Ortholog of  Ceres SEQ ID NO 13596089 as cited in SEQ ID NO 68373

SEQ ID NO: 111873 - protein, 467 aa, Arabidopsis thaliana; identical to SEQ ID NO: 100634
  peptide (1)..(467): Ceres Seq. ID no. 13605685

SEQ ID NO: 111874 - protein, 449 aa, Arabidopsis thaliana; identical to SEQ ID NO: 100635
  peptide (1)..(449): Ceres Seq. ID no. 13605686

SEQ ID NO: 111875 - protein, 446 aa, Arabidopsis thaliana; identical to SEQ ID NO: 100636
  peptide (1)..(446): Ceres Seq. ID no. 13605687

SEQ ID NO: 111876 - DNA, 596 bp, Arabidopsis thaliana; identical to SEQ ID NO: 100637
  misc_feature (1)..(596): Ceres Seq. ID no. 13605691
  misc_feature (1)..(596): Ortholog of  Ceres SEQ ID NO 12612527 as cited in SEQ ID NO 52588

SEQ ID NO: 111877 - protein, 122 aa, Arabidopsis thaliana; identical to SEQ ID NO: 100638
  peptide (1)..(122): Ceres Seq. ID no. 13605692

SEQ ID NO: 111878 - protein, 118 aa, Arabidopsis thaliana; identical to SEQ ID NO: 28436
  peptide (1)..(118): Ceres Seq. ID no. 13605693

SEQ ID NO: 111879 - protein, 68 aa, Arabidopsis thaliana; identical to SEQ ID NO: 28437
  peptide (1)..(68): Ceres Seq. ID no. 13605694

SEQ ID NO: 111880 - DNA, 1146 bp, Arabidopsis thaliana; identical to SEQ ID NO: 100641
  misc_feature (1)..(1146): Ceres Seq. ID no. 13605703
  misc_feature (1)..(1146): Ortholog of  Ceres SEQ ID NO 13599030 as cited in SEQ ID NO 0

SEQ ID NO: 111881 - protein, 336 aa, Arabidopsis thaliana; identical to SEQ ID NO: 100642
  peptide (1)..(336): Ceres Seq. ID no. 13605704

SEQ ID NO: 111882 - protein, 319 aa, Arabidopsis thaliana; identical to SEQ ID NO: 100643
  peptide (1)..(319): Ceres Seq. ID no. 13605705

SEQ ID NO: 111883 - DNA, 1212 bp, Arabidopsis thaliana; identical to SEQ ID NO: 100644
  misc_feature (1)..(1212): Ceres Seq. ID no. 13605706
  misc_feature (1)..(1212): Ortholog of  Ceres SEQ ID NO 13656155 as cited in SEQ ID NO 64609

SEQ ID NO: 111884 - protein, 292 aa, Arabidopsis thaliana; identical to SEQ ID NO: 100645
  peptide (1)..(292): Ceres Seq. ID no. 13605707

SEQ ID NO: 111885 - DNA, 1253 bp, Arabidopsis thaliana; identical to SEQ ID NO: 100646
  misc_feature (1)..(1253): Ceres Seq. ID no. 13605708
  misc_feature (1)..(1253): Ortholog of  Ceres SEQ ID NO 13596891 as cited in SEQ ID NO 62868
  misc_feature (1)..(1253): Ortholog of  Ceres SEQ ID NO 12617235 as cited in SEQ ID NO 63990
  misc_feature (1)..(1253): Ortholog of  Ceres SEQ ID NO 13655371 as cited in SEQ ID NO 68945

SEQ ID NO: 111886 - protein, 350 aa, Arabidopsis thaliana; identical to SEQ ID NO: 77649
  peptide (1)..(350): Ceres Seq. ID no. 13605709

SEQ ID NO: 111887 - protein, 324 aa, Arabidopsis thaliana; identical to SEQ ID NO: 77650
  peptide (1)..(324): Ceres Seq. ID no. 13605710

SEQ ID NO: 111888 - protein, 292 aa, Arabidopsis thaliana; identical to SEQ ID NO: 77651
  peptide (1)..(292): Ceres Seq. ID no. 13605711

SEQ ID NO: 111889 - DNA, 650 bp, Arabidopsis thaliana; identical to SEQ ID NO: 100650
  misc_feature (1)..(650): Ceres Seq. ID no. 13605712
  misc_feature (1)..(650): Ortholog of  Ceres SEQ ID NO 13585616 as cited in SEQ ID NO 63719

SEQ ID NO: 111890 - protein, 98 aa, Arabidopsis thaliana; identical to SEQ ID NO: 21579
  peptide (1)..(98): Ceres Seq. ID no. 13605713

SEQ ID NO: 111891 - protein, 62 aa, Arabidopsis thaliana; identical to SEQ ID NO: 21580
  peptide (1)..(62): Ceres Seq. ID no. 13605714

SEQ ID NO: 111892 - DNA, 1560 bp, Arabidopsis thaliana; identical to SEQ ID NO: 100653
  misc_feature (1)..(1560): Ceres Seq. ID no. 13605720
  misc_feature (1)..(1560): Ortholog of  Ceres SEQ ID NO 13654928 as cited in SEQ ID NO 62546

SEQ ID NO: 111893 - protein, 419 aa, Arabidopsis thaliana; identical to SEQ ID NO: 100654
  peptide (1)..(419): Ceres Seq. ID no. 13605721

SEQ ID NO: 111894 - protein, 387 aa, Arabidopsis thaliana; identical to SEQ ID NO: 100655
  peptide (1)..(387): Ceres Seq. ID no. 13605722

SEQ ID NO: 111895 - DNA, 1133 bp, Arabidopsis thaliana; identical to SEQ ID NO: 100656
  misc_feature (1)..(1133): Ceres Seq. ID no. 13605727
  misc_feature (1)..(1133): Ortholog of  Ceres SEQ ID NO 13596392 as cited in SEQ ID NO 62136
  misc_feature (1)..(1133): Ortholog of  Ceres SEQ ID NO 13654360 as cited in SEQ ID NO 67980
  misc_feature (1)..(1133): Ortholog of  Ceres SEQ ID NO 13596394 as cited in SEQ ID NO 68561

SEQ ID NO: 111896 - protein, 327 aa, Arabidopsis thaliana; identical to SEQ ID NO: 100657
  peptide (1)..(327): Ceres Seq. ID no. 13605728

SEQ ID NO: 111897 - DNA, 795 bp, Arabidopsis thaliana; identical to SEQ ID NO: 100658
  misc_feature (1)..(795): Ceres Seq. ID no. 13605733
  misc_feature (1)..(795): Ortholog of  Ceres SEQ ID NO 12624653 as cited in SEQ ID NO 61262
  misc_feature (1)..(795): Ortholog of  Ceres SEQ ID NO 12579223 as cited in SEQ ID NO 0
  misc_feature (1)..(795): Ortholog of  Ceres SEQ ID NO 12635708 as cited in SEQ ID NO 0

SEQ ID NO: 111898 - protein, 154 aa, Arabidopsis thaliana; identical to SEQ ID NO: 100659
  peptide (1)..(154): Ceres Seq. ID no. 13605734

SEQ ID NO: 111899 - protein, 132 aa, Arabidopsis thaliana; identical to SEQ ID NO: 100660
  peptide (1)..(132): Ceres Seq. ID no. 13605735

SEQ ID NO: 111900 - DNA, 2934 bp, Arabidopsis thaliana; identical to SEQ ID NO: 100661
  misc_feature (1)..(2934): Ceres Seq. ID no. 13605736
  misc_feature (1)..(2934): Ortholog of  Ceres SEQ ID NO 15169274 as cited in SEQ ID NO 55176

SEQ ID NO: 111901 - protein, 831 aa, Arabidopsis thaliana; identical to SEQ ID NO: 100662
  peptide (1)..(831): Ceres Seq. ID no. 13605737

SEQ ID NO: 111902 - protein, 797 aa, Arabidopsis thaliana; identical to SEQ ID NO: 100663
  peptide (1)..(797): Ceres Seq. ID no. 13605738

SEQ ID NO: 111903 - protein, 750 aa, Arabidopsis thaliana; identical to SEQ ID NO: 100664
  peptide (1)..(750): Ceres Seq. ID no. 13605739

SEQ ID NO: 111904 - DNA, 1929 bp, Arabidopsis thaliana; identical to SEQ ID NO: 100665
  misc_feature (1)..(1929): Ceres Seq. ID no. 13605751
  misc_feature (1)..(1929): Ortholog of  Ceres SEQ ID NO 13594317 as cited in SEQ ID NO 57796

SEQ ID NO: 111905 - protein, 432 aa, Arabidopsis thaliana; identical to SEQ ID NO: 100666
  peptide (1)..(432): Ceres Seq. ID no. 13605752

SEQ ID NO: 111906 - protein, 288 aa, Arabidopsis thaliana; identical to SEQ ID NO: 100667
  peptide (1)..(288): Ceres Seq. ID no. 13605753

SEQ ID NO: 111907 - protein, 280 aa, Arabidopsis thaliana; identical to SEQ ID NO: 100668
  peptide (1)..(280): Ceres Seq. ID no. 13605754

SEQ ID NO: 111908 - DNA, 1756 bp, Arabidopsis thaliana; identical to SEQ ID NO: 100669
  misc_feature (1)..(1756): Ceres Seq. ID no. 13605755
  misc_feature (1)..(1756): Ortholog of  Ceres SEQ ID NO 14313216 as cited in SEQ ID NO 66103

SEQ ID NO: 111909 - protein, 538 aa, Arabidopsis thaliana; identical to SEQ ID NO: 100670
  peptide (1)..(538): Ceres Seq. ID no. 13605756

SEQ ID NO: 111910 - protein, 533 aa, Arabidopsis thaliana; identical to SEQ ID NO: 100671
  peptide (1)..(533): Ceres Seq. ID no. 13605757

SEQ ID NO: 111911 - protein, 495 aa, Arabidopsis thaliana; identical to SEQ ID NO: 100672
  peptide (1)..(495): Ceres Seq. ID no. 13605758

SEQ ID NO: 111912 - DNA, 4585 bp, Arabidopsis thaliana; identical to SEQ ID NO: 100673
  misc_feature (1)..(4585): Ceres Seq. ID no. 13605763
  misc_feature (1)..(4585): Ortholog of  Ceres SEQ ID NO 12614157 as cited in SEQ ID NO 67965

SEQ ID NO: 111913 - protein, 1488 aa, Arabidopsis thaliana; identical to SEQ ID NO: 100674
  peptide (1)..(1488): Ceres Seq. ID no. 13605764

SEQ ID NO: 111914 - protein, 1450 aa, Arabidopsis thaliana; identical to SEQ ID NO: 100675
  peptide (1)..(1450): Ceres Seq. ID no. 13605765

SEQ ID NO: 111915 - protein, 1441 aa, Arabidopsis thaliana; identical to SEQ ID NO: 100676
  peptide (1)..(1441): Ceres Seq. ID no. 13605766

SEQ ID NO: 111916 - DNA, 1716 bp, Arabidopsis thaliana; identical to SEQ ID NO: 100677
  misc_feature (1)..(1716): Ceres Seq. ID no. 13605793
  misc_feature (1)..(1716): Ortholog of  Ceres SEQ ID NO 13660287 as cited in SEQ ID NO 67316

SEQ ID NO: 111917 - protein, 491 aa, Arabidopsis thaliana; identical to SEQ ID NO: 100678
  peptide (1)..(491): Ceres Seq. ID no. 13605794

SEQ ID NO: 111918 - protein, 468 aa, Arabidopsis thaliana; identical to SEQ ID NO: 100679
  peptide (1)..(468): Ceres Seq. ID no. 13605795

SEQ ID NO: 111919 - protein, 457 aa, Arabidopsis thaliana; identical to SEQ ID NO: 100680
  peptide (1)..(457): Ceres Seq. ID no. 13605796

SEQ ID NO: 111920 - DNA, 2117 bp, Arabidopsis thaliana; identical to SEQ ID NO: 100681
  misc_feature (1)..(2117): Ceres Seq. ID no. 13605801
  misc_feature (1)..(2117): Ortholog of  Ceres SEQ ID NO 14312351 as cited in SEQ ID NO 55278
  misc_feature (1)..(2117): Ortholog of  Ceres SEQ ID NO 13655237 as cited in SEQ ID NO 62892
  misc_feature (1)..(2117): Ortholog of  Ceres SEQ ID NO 13597268 as cited in SEQ ID NO 63929
  misc_feature (1)..(2117): Ortholog of  Ceres SEQ ID NO 13659840 as cited in SEQ ID NO 66970
  misc_feature (1)..(2117): Ortholog of  Ceres SEQ ID NO 13660544 as cited in SEQ ID NO 67401

SEQ ID NO: 111921 - protein, 680 aa, Arabidopsis thaliana; identical to SEQ ID NO: 100682
  peptide (1)..(680): Ceres Seq. ID no. 13605802

SEQ ID NO: 111922 - protein, 669 aa, Arabidopsis thaliana; identical to SEQ ID NO: 100683
  peptide (1)..(669): Ceres Seq. ID no. 13605803

SEQ ID NO: 111923 - protein, 658 aa, Arabidopsis thaliana; identical to SEQ ID NO: 100684
  peptide (1)..(658): Ceres Seq. ID no. 13605804

SEQ ID NO: 111924 - DNA, 1440 bp, Arabidopsis thaliana; identical to SEQ ID NO: 100685
  misc_feature (1)..(1440): Ceres Seq. ID no. 13605824
  misc_feature (1)..(1440): Ortholog of  Ceres SEQ ID NO 14314511 as cited in SEQ ID NO 52424

SEQ ID NO: 111925 - protein, 339 aa, Arabidopsis thaliana; identical to SEQ ID NO: 100686
  peptide (1)..(339): Ceres Seq. ID no. 13605825

SEQ ID NO: 111926 - protein, 325 aa, Arabidopsis thaliana; identical to SEQ ID NO: 100687
  peptide (1)..(325): Ceres Seq. ID no. 13605826

SEQ ID NO: 111927 - protein, 303 aa, Arabidopsis thaliana; identical to SEQ ID NO: 100688
  peptide (1)..(303): Ceres Seq. ID no. 13605827

SEQ ID NO: 111928 - DNA, 1792 bp, Arabidopsis thaliana; identical to SEQ ID NO: 100689
  misc_feature (1)..(1792): Ceres Seq. ID no. 13605828
  misc_feature (1)..(1792): Ortholog of  Ceres SEQ ID NO 15169749 as cited in SEQ ID NO 55675
  misc_feature (1)..(1792): Ortholog of  Ceres SEQ ID NO 12612090 as cited in SEQ ID NO 58429
  misc_feature (1520)..(1520): n is a, c, t, g, unknown, or other
  misc_feature (1521)..(1521): n is a, c, t, g, unknown, or other
  misc_feature (1558)..(1558): n is a, c, t, g, unknown, or other
  misc_feature (1565)..(1565): n is a, c, t, g, unknown, or other
  misc_feature (1570)..(1570): n is a, c, t, g, unknown, or other
  misc_feature (1574)..(1574): n is a, c, t, g, unknown, or other

SEQ ID NO: 111929 - protein, 501 aa, Arabidopsis thaliana; identical to SEQ ID NO: 100690
  peptide (1)..(501): Ceres Seq. ID no. 13605829

SEQ ID NO: 111930 - protein, 488 aa, Arabidopsis thaliana; identical to SEQ ID NO: 100691
  peptide (1)..(488): Ceres Seq. ID no. 13605830

SEQ ID NO: 111931 - protein, 438 aa, Arabidopsis thaliana; identical to SEQ ID NO: 100692
  peptide (1)..(438): Ceres Seq. ID no. 13605831

SEQ ID NO: 111932 - DNA, 1595 bp, Arabidopsis thaliana; identical to SEQ ID NO: 100693
  misc_feature (1)..(1595): Ceres Seq. ID no. 13605840
  misc_feature (1)..(1595): Ortholog of  Ceres SEQ ID NO 13594345 as cited in SEQ ID NO 58043
  misc_feature (1)..(1595): Ortholog of  Ceres SEQ ID NO 12614112 as cited in SEQ ID NO 60891
  misc_feature (1)..(1595): Ortholog of  Ceres SEQ ID NO 14302832 as cited in SEQ ID NO 64926
  misc_feature (1)..(1595): Ortholog of  Ceres SEQ ID NO 13662880 as cited in SEQ ID NO 65422
  misc_feature (1)..(1595): Ortholog of  Ceres SEQ ID NO 12779098 as cited in SEQ ID NO 67698
  misc_feature (1)..(1595): Ortholog of  Ceres SEQ ID NO 13596180 as cited in SEQ ID NO 67941
  misc_feature (1)..(1595): Ortholog of  Ceres SEQ ID NO 13591190 as cited in SEQ ID NO 68044
  misc_feature (1)..(1595): Ortholog of  Ceres SEQ ID NO 13596089 as cited in SEQ ID NO 68373

SEQ ID NO: 111933 - protein, 490 aa, Arabidopsis thaliana; identical to SEQ ID NO: 100694
  peptide (1)..(490): Ceres Seq. ID no. 13605841

SEQ ID NO: 111934 - protein, 469 aa, Arabidopsis thaliana; identical to SEQ ID NO: 100695
  peptide (1)..(469): Ceres Seq. ID no. 13605842

SEQ ID NO: 111935 - protein, 422 aa, Arabidopsis thaliana; identical to SEQ ID NO: 100696
  peptide (1)..(422): Ceres Seq. ID no. 13605843

SEQ ID NO: 111936 - DNA, 1820 bp, Arabidopsis thaliana; identical to SEQ ID NO: 100697
  misc_feature (1)..(1820): Ceres Seq. ID no. 13605855
  misc_feature (1)..(1820): Ortholog of  Ceres SEQ ID NO 14314945 as cited in SEQ ID NO 58031
  misc_feature (1)..(1820): Ortholog of  Ceres SEQ ID NO 13595833 as cited in SEQ ID NO 59877
  misc_feature (1)..(1820): Ortholog of  Ceres SEQ ID NO 13654452 as cited in SEQ ID NO 65792
  misc_feature (1)..(1820): Ortholog of  Ceres SEQ ID NO 13573778 as cited in SEQ ID NO 0

SEQ ID NO: 111937 - protein, 423 aa, Arabidopsis thaliana; identical to SEQ ID NO: 41604
  peptide (1)..(423): Ceres Seq. ID no. 13605856

SEQ ID NO: 111938 - protein, 390 aa, Arabidopsis thaliana; identical to SEQ ID NO: 41605
  peptide (1)..(390): Ceres Seq. ID no. 13605857

SEQ ID NO: 111939 - protein, 361 aa, Arabidopsis thaliana; identical to SEQ ID NO: 41606
  peptide (1)..(361): Ceres Seq. ID no. 13605858

SEQ ID NO: 111940 - DNA, 3615 bp, Arabidopsis thaliana; identical to SEQ ID NO: 100701
  misc_feature (1)..(3615): Ceres Seq. ID no. 13605875
  misc_feature (1)..(3615): Ortholog of  Ceres SEQ ID NO 15224720 as cited in SEQ ID NO 0

SEQ ID NO: 111941 - protein, 1147 aa, Arabidopsis thaliana; identical to SEQ ID NO: 100702
  peptide (1)..(1147): Ceres Seq. ID no. 13605876

SEQ ID NO: 111942 - protein, 1141 aa, Arabidopsis thaliana; identical to SEQ ID NO: 100703
  peptide (1)..(1141): Ceres Seq. ID no. 13605877

SEQ ID NO: 111943 - protein, 1007 aa, Arabidopsis thaliana; identical to SEQ ID NO: 100704
  peptide (1)..(1007): Ceres Seq. ID no. 13605878

SEQ ID NO: 111944 - DNA, 965 bp, Arabidopsis thaliana; identical to SEQ ID NO: 100705
  misc_feature (1)..(965): Ceres Seq. ID no. 13605883
  misc_feature (1)..(965): Ortholog of  Ceres SEQ ID NO 13638835 as cited in SEQ ID NO 52005
  misc_feature (1)..(965): Ortholog of  Ceres SEQ ID NO 12614289 as cited in SEQ ID NO 68735
  misc_feature (1)..(965): Ortholog of  Ceres SEQ ID NO 14309007 as cited in SEQ ID NO 0

SEQ ID NO: 111945 - protein, 229 aa, Arabidopsis thaliana; identical to SEQ ID NO: 100706
  peptide (1)..(229): Ceres Seq. ID no. 13605884

SEQ ID NO: 111946 - protein, 158 aa, Arabidopsis thaliana; identical to SEQ ID NO: 100707
  peptide (1)..(158): Ceres Seq. ID no. 13605885

SEQ ID NO: 111947 - protein, 148 aa, Arabidopsis thaliana; identical to SEQ ID NO: 100708
  peptide (1)..(148): Ceres Seq. ID no. 13605886

SEQ ID NO: 111948 - DNA, 1165 bp, Arabidopsis thaliana; identical to SEQ ID NO: 100709
  misc_feature (1)..(1165): Ceres Seq. ID no. 13605901
  misc_feature (1)..(1165): Ortholog of  Ceres SEQ ID NO 13654728 as cited in SEQ ID NO 62302
  misc_feature (1)..(1165): Ortholog of  Ceres SEQ ID NO 13597134 as cited in SEQ ID NO 64501
  misc_feature (1)..(1165): Ortholog of  Ceres SEQ ID NO 15174333 as cited in SEQ ID NO 0
  misc_feature (1)..(1165): Ortholog of  Ceres SEQ ID NO 15179047 as cited in SEQ ID NO 0

SEQ ID NO: 111949 - protein, 278 aa, Arabidopsis thaliana; identical to SEQ ID NO: 23413
  peptide (1)..(278): Ceres Seq. ID no. 13605902

SEQ ID NO: 111950 - protein, 260 aa, Arabidopsis thaliana; identical to SEQ ID NO: 23414
  peptide (1)..(260): Ceres Seq. ID no. 13605903

SEQ ID NO: 111951 - protein, 219 aa, Arabidopsis thaliana; identical to SEQ ID NO: 23415
  peptide (1)..(219): Ceres Seq. ID no. 13605904

SEQ ID NO: 111952 - DNA, 764 bp, Arabidopsis thaliana; identical to SEQ ID NO: 100713
  misc_feature (1)..(764): Ceres Seq. ID no. 13605917
  misc_feature (1)..(764): Ortholog of  Ceres SEQ ID NO 15176099 as cited in SEQ ID NO 59451

SEQ ID NO: 111953 - protein, 156 aa, Arabidopsis thaliana; identical to SEQ ID NO: 34973
  peptide (1)..(156): Ceres Seq. ID no. 13605918

SEQ ID NO: 111954 - protein, 104 aa, Arabidopsis thaliana; identical to SEQ ID NO: 34974
  peptide (1)..(104): Ceres Seq. ID no. 13605919

SEQ ID NO: 111955 - DNA, 1611 bp, Arabidopsis thaliana; identical to SEQ ID NO: 100716
  misc_feature (1)..(1611): Ceres Seq. ID no. 13605924
  misc_feature (1)..(1611): Ortholog of  Ceres SEQ ID NO 13598351 as cited in SEQ ID NO 68715
  misc_feature (1)..(1611): Ortholog of  Ceres SEQ ID NO 13584744 as cited in SEQ ID NO 69137

SEQ ID NO: 111956 - protein, 350 aa, Arabidopsis thaliana; identical to SEQ ID NO: 34965
  peptide (1)..(350): Ceres Seq. ID no. 13605925

SEQ ID NO: 111957 - protein, 235 aa, Arabidopsis thaliana; identical to SEQ ID NO: 34966
  peptide (1)..(235): Ceres Seq. ID no. 13605926

SEQ ID NO: 111958 - protein, 210 aa, Arabidopsis thaliana; identical to SEQ ID NO: 34967
  peptide (1)..(210): Ceres Seq. ID no. 13605927

SEQ ID NO: 111959 - DNA, 586 bp, Arabidopsis thaliana; identical to SEQ ID NO: 100720
  misc_feature (1)..(586): Ceres Seq. ID no. 13605936
  misc_feature (1)..(586): Ortholog of  Ceres SEQ ID NO 12612527 as cited in SEQ ID NO 52588

SEQ ID NO: 111960 - protein, 117 aa, Arabidopsis thaliana; identical to SEQ ID NO: 100721
  peptide (1)..(117): Ceres Seq. ID no. 13605937

SEQ ID NO: 111961 - protein, 67 aa, Arabidopsis thaliana; identical to SEQ ID NO: 100722
  peptide (1)..(67): Ceres Seq. ID no. 13605938

SEQ ID NO: 111962 - protein, 61 aa, Arabidopsis thaliana; identical to SEQ ID NO: 100723
  peptide (1)..(61): Ceres Seq. ID no. 13605939

SEQ ID NO: 111963 - DNA, 723 bp, Arabidopsis thaliana; identical to SEQ ID NO: 100724
  misc_feature (1)..(723): Ceres Seq. ID no. 13605947
  misc_feature (1)..(723): Ortholog of  Ceres SEQ ID NO 12585325 as cited in SEQ ID NO 63062

SEQ ID NO: 111964 - protein, 205 aa, Arabidopsis thaliana; identical to SEQ ID NO: 100725
  peptide (1)..(205): Ceres Seq. ID no. 13605948

SEQ ID NO: 111965 - protein, 186 aa, Arabidopsis thaliana; identical to SEQ ID NO: 100726
  peptide (1)..(186): Ceres Seq. ID no. 13605949

SEQ ID NO: 111966 - protein, 111 aa, Arabidopsis thaliana; identical to SEQ ID NO: 100727
  peptide (1)..(111): Ceres Seq. ID no. 13605950

SEQ ID NO: 111967 - DNA, 1686 bp, Arabidopsis thaliana; identical to SEQ ID NO: 100728
  misc_feature (1)..(1686): Ceres Seq. ID no. 13605951
  misc_feature (1)..(1686): Ortholog of  Ceres SEQ ID NO 15176457 as cited in SEQ ID NO 55547
  misc_feature (1)..(1686): Ortholog of  Ceres SEQ ID NO 13594349 as cited in SEQ ID NO 58161
  misc_feature (1)..(1686): Ortholog of  Ceres SEQ ID NO 13663419 as cited in SEQ ID NO 66561

SEQ ID NO: 111968 - protein, 469 aa, Arabidopsis thaliana; identical to SEQ ID NO: 100729
  peptide (1)..(469): Ceres Seq. ID no. 13605952

SEQ ID NO: 111969 - protein, 459 aa, Arabidopsis thaliana; identical to SEQ ID NO: 100730
  peptide (1)..(459): Ceres Seq. ID no. 13605953

SEQ ID NO: 111970 - protein, 457 aa, Arabidopsis thaliana; identical to SEQ ID NO: 100731
  peptide (1)..(457): Ceres Seq. ID no. 13605954

SEQ ID NO: 111971 - DNA, 2843 bp, Arabidopsis thaliana; identical to SEQ ID NO: 100732
  misc_feature (1)..(2843): Ceres Seq. ID no. 13605983
  misc_feature (1)..(2843): Ortholog of  Ceres SEQ ID NO 14310452 as cited in SEQ ID NO 54426
  misc_feature (1)..(2843): Ortholog of  Ceres SEQ ID NO 15169663 as cited in SEQ ID NO 64659
  misc_feature (1)..(2843): Ortholog of  Ceres SEQ ID NO 13656177 as cited in SEQ ID NO 64997
  misc_feature (1)..(2843): Ortholog of  Ceres SEQ ID NO 15225015 as cited in SEQ ID NO 0

SEQ ID NO: 111972 - protein, 789 aa, Arabidopsis thaliana; identical to SEQ ID NO: 100733
  peptide (1)..(789): Ceres Seq. ID no. 13605984

SEQ ID NO: 111973 - protein, 620 aa, Arabidopsis thaliana; identical to SEQ ID NO: 100734
  peptide (1)..(620): Ceres Seq. ID no. 13605985

SEQ ID NO: 111974 - protein, 533 aa, Arabidopsis thaliana; identical to SEQ ID NO: 100735
  peptide (1)..(533): Ceres Seq. ID no. 13605986

SEQ ID NO: 111975 - DNA, 1076 bp, Arabidopsis thaliana; identical to SEQ ID NO: 100736
  misc_feature (1)..(1076): Ceres Seq. ID no. 13605987
  misc_feature (1)..(1076): Ortholog of  Ceres SEQ ID NO 14302919 as cited in SEQ ID NO 20338
  misc_feature (1)..(1076): Ortholog of  Ceres SEQ ID NO 13595497 as cited in SEQ ID NO 51127

SEQ ID NO: 111976 - protein, 312 aa, Arabidopsis thaliana; identical to SEQ ID NO: 100737
  peptide (1)..(312): Ceres Seq. ID no. 13605988

SEQ ID NO: 111977 - protein, 284 aa, Arabidopsis thaliana; identical to SEQ ID NO: 37759
  peptide (1)..(284): Ceres Seq. ID no. 13605989

SEQ ID NO: 111978 - protein, 283 aa, Arabidopsis thaliana; identical to SEQ ID NO: 37760
  peptide (1)..(283): Ceres Seq. ID no. 13605990

SEQ ID NO: 111979 - DNA, 2658 bp, Arabidopsis thaliana; identical to SEQ ID NO: 100740
  misc_feature (1)..(2658): Ceres Seq. ID no. 13606003
  misc_feature (1)..(2658): Ortholog of  Ceres SEQ ID NO 14314812 as cited in SEQ ID NO 52569
  misc_feature (1)..(2658): Ortholog of  Ceres SEQ ID NO 15168492 as cited in SEQ ID NO 58104

SEQ ID NO: 111980 - protein, 463 aa, Arabidopsis thaliana; identical to SEQ ID NO: 76097
  peptide (1)..(463): Ceres Seq. ID no. 13606004

SEQ ID NO: 111981 - protein, 459 aa, Arabidopsis thaliana; identical to SEQ ID NO: 76098
  peptide (1)..(459): Ceres Seq. ID no. 13606005

SEQ ID NO: 111982 - protein, 385 aa, Arabidopsis thaliana; identical to SEQ ID NO: 76099
  peptide (1)..(385): Ceres Seq. ID no. 13606006

SEQ ID NO: 111983 - DNA, 591 bp, Arabidopsis thaliana; identical to SEQ ID NO: 100744
  misc_feature (1)..(591): Ceres Seq. ID no. 13606007
  misc_feature (1)..(591): Ortholog of  Ceres SEQ ID NO 12614814 as cited in SEQ ID NO 68816

SEQ ID NO: 111984 - protein, 163 aa, Arabidopsis thaliana; identical to SEQ ID NO: 100745
  peptide (1)..(163): Ceres Seq. ID no. 13606008

SEQ ID NO: 111985 - DNA, 1757 bp, Arabidopsis thaliana; identical to SEQ ID NO: 100746
  misc_feature (1)..(1757): Ceres Seq. ID no. 13606009
  misc_feature (1)..(1757): Ortholog of  Ceres SEQ ID NO 15178767 as cited in SEQ ID NO 55317
  misc_feature (1)..(1757): Ortholog of  Ceres SEQ ID NO 13657647 as cited in SEQ ID NO 66399

SEQ ID NO: 111986 - protein, 442 aa, Arabidopsis thaliana; identical to SEQ ID NO: 76969
  peptide (1)..(442): Ceres Seq. ID no. 13606010

SEQ ID NO: 111987 - protein, 426 aa, Arabidopsis thaliana; identical to SEQ ID NO: 76970
  peptide (1)..(426): Ceres Seq. ID no. 13606011

SEQ ID NO: 111988 - protein, 378 aa, Arabidopsis thaliana; identical to SEQ ID NO: 76971
  peptide (1)..(378): Ceres Seq. ID no. 13606012

SEQ ID NO: 111989 - DNA, 2331 bp, Arabidopsis thaliana; identical to SEQ ID NO: 100750
  misc_feature (1)..(2331): Ceres Seq. ID no. 13606013
  misc_feature (1)..(2331): Ortholog of  Ceres SEQ ID NO 14303276 as cited in SEQ ID NO 1264
  misc_feature (1)..(2331): Ortholog of  Ceres SEQ ID NO 15170536 as cited in SEQ ID NO 52791
  misc_feature (1)..(2331): Ortholog of  Ceres SEQ ID NO 15171813 as cited in SEQ ID NO 57309
  misc_feature (1)..(2331): Ortholog of  Ceres SEQ ID NO 14314378 as cited in SEQ ID NO 57601
  misc_feature (1)..(2331): Ortholog of  Ceres SEQ ID NO 12465083 as cited in SEQ ID NO 68239

SEQ ID NO: 111990 - protein, 646 aa, Arabidopsis thaliana; identical to SEQ ID NO: 100751
  peptide (1)..(646): Ceres Seq. ID no. 13606014

SEQ ID NO: 111991 - protein, 623 aa, Arabidopsis thaliana; identical to SEQ ID NO: 100752
  peptide (1)..(623): Ceres Seq. ID no. 13606015

SEQ ID NO: 111992 - protein, 542 aa, Arabidopsis thaliana; identical to SEQ ID NO: 100753
  peptide (1)..(542): Ceres Seq. ID no. 13606016

SEQ ID NO: 111993 - DNA, 2552 bp, Arabidopsis thaliana; identical to SEQ ID NO: 100754
  misc_feature (1)..(2552): Ceres Seq. ID no. 13606021
  misc_feature (1)..(2552): Ortholog of  Ceres SEQ ID NO 13584744 as cited in SEQ ID NO 69137

SEQ ID NO: 111994 - protein, 748 aa, Arabidopsis thaliana; identical to SEQ ID NO: 100755
  peptide (1)..(748): Ceres Seq. ID no. 13606022

SEQ ID NO: 111995 - protein, 607 aa, Arabidopsis thaliana; identical to SEQ ID NO: 100756
  peptide (1)..(607): Ceres Seq. ID no. 13606023

SEQ ID NO: 111996 - protein, 374 aa, Arabidopsis thaliana; identical to SEQ ID NO: 100757
  peptide (1)..(374): Ceres Seq. ID no. 13606024

SEQ ID NO: 111997 - DNA, 778 bp, Arabidopsis thaliana; identical to SEQ ID NO: 100758
  misc_feature (1)..(778): Ceres Seq. ID no. 13606025
  misc_feature (1)..(778): Ortholog of  Ceres SEQ ID NO 13504224 as cited in SEQ ID NO 137
  misc_feature (1)..(778): Ortholog of  Ceres SEQ ID NO 12635820 as cited in SEQ ID NO 0

SEQ ID NO: 111998 - protein, 147 aa, Arabidopsis thaliana; identical to SEQ ID NO: 100759
  peptide (1)..(147): Ceres Seq. ID no. 13606026

SEQ ID NO: 111999 - protein, 81 aa, Arabidopsis thaliana; identical to SEQ ID NO: 100760
  peptide (1)..(81): Ceres Seq. ID no. 13606027

SEQ ID NO: 112000 - DNA, 1349 bp, Arabidopsis thaliana; identical to SEQ ID NO: 100761
  misc_feature (1)..(1349): Ceres Seq. ID no. 13606028
  misc_feature (1)..(1349): Ortholog of  Ceres SEQ ID NO 12636774 as cited in SEQ ID NO 372
  misc_feature (1)..(1349): Ortholog of  Ceres SEQ ID NO 13582350 as cited in SEQ ID NO 56734
  misc_feature (1)..(1349): Ortholog of  Ceres SEQ ID NO 12582113 as cited in SEQ ID NO 58349
  misc_feature (1)..(1349): Ortholog of  Ceres SEQ ID NO 15175861 as cited in SEQ ID NO 59381
  misc_feature (1)..(1349): Ortholog of  Ceres SEQ ID NO 12615466 as cited in SEQ ID NO 62761
  misc_feature (1)..(1349): Ortholog of  Ceres SEQ ID NO 14314080 as cited in SEQ ID NO 63105
  misc_feature (1)..(1349): Ortholog of  Ceres SEQ ID NO 13597295 as cited in SEQ ID NO 63743
  misc_feature (1)..(1349): Ortholog of  Ceres SEQ ID NO 12617090 as cited in SEQ ID NO 64005
  misc_feature (1)..(1349): Ortholog of  Ceres SEQ ID NO 15226458 as cited in SEQ ID NO 64042
  misc_feature (1)..(1349): Ortholog of  Ceres SEQ ID NO 13597439 as cited in SEQ ID NO 64081
  misc_feature (1)..(1349): Ortholog of  Ceres SEQ ID NO 13597233 as cited in SEQ ID NO 64370
  misc_feature (1)..(1349): Ortholog of  Ceres SEQ ID NO 13598327 as cited in SEQ ID NO 68040
  misc_feature (1)..(1349): Ortholog of  Ceres SEQ ID NO 13599438 as cited in SEQ ID NO 0

SEQ ID NO: 112001 - protein, 392 aa, Arabidopsis thaliana; identical to SEQ ID NO: 100762
  peptide (1)..(392): Ceres Seq. ID no. 13606029

SEQ ID NO: 112002 - protein, 361 aa, Arabidopsis thaliana; identical to SEQ ID NO: 100763
  peptide (1)..(361): Ceres Seq. ID no. 13606030

SEQ ID NO: 112003 - protein, 342 aa, Arabidopsis thaliana; identical to SEQ ID NO: 100764
  peptide (1)..(342): Ceres Seq. ID no. 13606031

SEQ ID NO: 112004 - DNA, 1396 bp, Arabidopsis thaliana; identical to SEQ ID NO: 100765
  misc_feature (1)..(1396): Ceres Seq. ID no. 13606032
  misc_feature (1)..(1396): Ortholog of  Ceres SEQ ID NO 12636774 as cited in SEQ ID NO 372
  misc_feature (1)..(1396): Ortholog of  Ceres SEQ ID NO 13582350 as cited in SEQ ID NO 56734
  misc_feature (1)..(1396): Ortholog of  Ceres SEQ ID NO 12476493 as cited in SEQ ID NO 58163
  misc_feature (1)..(1396): Ortholog of  Ceres SEQ ID NO 12582113 as cited in SEQ ID NO 58349
  misc_feature (1)..(1396): Ortholog of  Ceres SEQ ID NO 14310807 as cited in SEQ ID NO 58696
  misc_feature (1)..(1396): Ortholog of  Ceres SEQ ID NO 15175861 as cited in SEQ ID NO 59381
  misc_feature (1)..(1396): Ortholog of  Ceres SEQ ID NO 12615466 as cited in SEQ ID NO 62761
  misc_feature (1)..(1396): Ortholog of  Ceres SEQ ID NO 14314080 as cited in SEQ ID NO 63105
  misc_feature (1)..(1396): Ortholog of  Ceres SEQ ID NO 13597295 as cited in SEQ ID NO 63743
  misc_feature (1)..(1396): Ortholog of  Ceres SEQ ID NO 12617090 as cited in SEQ ID NO 64005
  misc_feature (1)..(1396): Ortholog of  Ceres SEQ ID NO 13597439 as cited in SEQ ID NO 64081
  misc_feature (1)..(1396): Ortholog of  Ceres SEQ ID NO 13597233 as cited in SEQ ID NO 64370
  misc_feature (1)..(1396): Ortholog of  Ceres SEQ ID NO 13598327 as cited in SEQ ID NO 68040
  misc_feature (1)..(1396): Ortholog of  Ceres SEQ ID NO 13599438 as cited in SEQ ID NO 0

SEQ ID NO: 112005 - protein, 373 aa, Arabidopsis thaliana; identical to SEQ ID NO: 100766
  peptide (1)..(373): Ceres Seq. ID no. 13606033

SEQ ID NO: 112006 - protein, 358 aa, Arabidopsis thaliana; identical to SEQ ID NO: 100767
  peptide (1)..(358): Ceres Seq. ID no. 13606034

SEQ ID NO: 112007 - protein, 339 aa, Arabidopsis thaliana; identical to SEQ ID NO: 100768
  peptide (1)..(339): Ceres Seq. ID no. 13606035

SEQ ID NO: 112008 - DNA, 1372 bp, Arabidopsis thaliana; identical to SEQ ID NO: 100769
  misc_feature (1)..(1372): Ceres Seq. ID no. 13606036
  misc_feature (1)..(1372): Ortholog of  Ceres SEQ ID NO 13596803 as cited in SEQ ID NO 62267

SEQ ID NO: 112009 - protein, 417 aa, Arabidopsis thaliana; identical to SEQ ID NO: 100770
  peptide (1)..(417): Ceres Seq. ID no. 13606037

SEQ ID NO: 112010 - protein, 416 aa, Arabidopsis thaliana; identical to SEQ ID NO: 100771
  peptide (1)..(416): Ceres Seq. ID no. 13606038

SEQ ID NO: 112011 - protein, 415 aa, Arabidopsis thaliana; identical to SEQ ID NO: 100772
  peptide (1)..(415): Ceres Seq. ID no. 13606039

SEQ ID NO: 112012 - DNA, 673 bp, Arabidopsis thaliana; identical to SEQ ID NO: 100773
  misc_feature (1)..(673): Ceres Seq. ID no. 13606048
  misc_feature (1)..(673): Ortholog of  Ceres SEQ ID NO 13655262 as cited in SEQ ID NO 62944

SEQ ID NO: 112013 - protein, 198 aa, Arabidopsis thaliana; identical to SEQ ID NO: 26728
  peptide (1)..(198): Ceres Seq. ID no. 13606049

SEQ ID NO: 112014 - protein, 153 aa, Arabidopsis thaliana; identical to SEQ ID NO: 26729
  peptide (1)..(153): Ceres Seq. ID no. 13606050

SEQ ID NO: 112015 - DNA, 1646 bp, Arabidopsis thaliana; identical to SEQ ID NO: 100776
  misc_feature (1)..(1646): Ceres Seq. ID no. 13606051
  misc_feature (1)..(1646): Ortholog of  Ceres SEQ ID NO 14314312 as cited in SEQ ID NO 57283

SEQ ID NO: 112016 - protein, 383 aa, Arabidopsis thaliana; identical to SEQ ID NO: 40903
  peptide (1)..(383): Ceres Seq. ID no. 13606052

SEQ ID NO: 112017 - protein, 331 aa, Arabidopsis thaliana; identical to SEQ ID NO: 40904
  peptide (1)..(331): Ceres Seq. ID no. 13606053

SEQ ID NO: 112018 - DNA, 1427 bp, Arabidopsis thaliana; identical to SEQ ID NO: 100779
  misc_feature (1)..(1427): Ceres Seq. ID no. 13606054
  misc_feature (1)..(1427): Ortholog of  Ceres SEQ ID NO 13582301 as cited in SEQ ID NO 56509

SEQ ID NO: 112019 - protein, 417 aa, Arabidopsis thaliana; identical to SEQ ID NO: 25250
  peptide (1)..(417): Ceres Seq. ID no. 13606055

SEQ ID NO: 112020 - protein, 392 aa, Arabidopsis thaliana; identical to SEQ ID NO: 25251
  peptide (1)..(392): Ceres Seq. ID no. 13606056

SEQ ID NO: 112021 - protein, 312 aa, Arabidopsis thaliana; identical to SEQ ID NO: 25252
  peptide (1)..(312): Ceres Seq. ID no. 13606057

SEQ ID NO: 112022 - DNA, 1635 bp, Arabidopsis thaliana; identical to SEQ ID NO: 100783
  misc_feature (1)..(1635): Ceres Seq. ID no. 13606058
  misc_feature (1)..(1635): Ortholog of  Ceres SEQ ID NO 12618197 as cited in SEQ ID NO 64478

SEQ ID NO: 112023 - protein, 438 aa, Arabidopsis thaliana; identical to SEQ ID NO: 100784
  peptide (1)..(438): Ceres Seq. ID no. 13606059

SEQ ID NO: 112024 - protein, 431 aa, Arabidopsis thaliana; identical to SEQ ID NO: 100785
  peptide (1)..(431): Ceres Seq. ID no. 13606060

SEQ ID NO: 112025 - protein, 378 aa, Arabidopsis thaliana; identical to SEQ ID NO: 100786
  peptide (1)..(378): Ceres Seq. ID no. 13606061

SEQ ID NO: 112026 - DNA, 2002 bp, Arabidopsis thaliana; identical to SEQ ID NO: 100787
  misc_feature (1)..(2002): Ceres Seq. ID no. 13606070
  misc_feature (1)..(2002): Ortholog of  Ceres SEQ ID NO 12616225 as cited in SEQ ID NO 68930

SEQ ID NO: 112027 - protein, 499 aa, Arabidopsis thaliana; identical to SEQ ID NO: 100788
  peptide (1)..(499): Ceres Seq. ID no. 13606071

SEQ ID NO: 112028 - protein, 481 aa, Arabidopsis thaliana; identical to SEQ ID NO: 100789
  peptide (1)..(481): Ceres Seq. ID no. 13606072

SEQ ID NO: 112029 - protein, 475 aa, Arabidopsis thaliana; identical to SEQ ID NO: 100790
  peptide (1)..(475): Ceres Seq. ID no. 13606073

SEQ ID NO: 112030 - DNA, 1468 bp, Arabidopsis thaliana; identical to SEQ ID NO: 100791
  misc_feature (1)..(1468): Ceres Seq. ID no. 13606078
  misc_feature (1)..(1468): Ortholog of  Ceres SEQ ID NO 14311721 as cited in SEQ ID NO 51363

SEQ ID NO: 112031 - protein, 364 aa, Arabidopsis thaliana; identical to SEQ ID NO: 100792
  peptide (1)..(364): Ceres Seq. ID no. 13606079

SEQ ID NO: 112032 - protein, 317 aa, Arabidopsis thaliana; identical to SEQ ID NO: 24236
  peptide (1)..(317): Ceres Seq. ID no. 13606080

SEQ ID NO: 112033 - protein, 252 aa, Arabidopsis thaliana; identical to SEQ ID NO: 24237
  peptide (1)..(252): Ceres Seq. ID no. 13606081

SEQ ID NO: 112034 - DNA, 1784 bp, Arabidopsis thaliana; identical to SEQ ID NO: 100795
  misc_feature (1)..(1784): Ceres Seq. ID no. 13606082
  misc_feature (1)..(1784): Ortholog of  Ceres SEQ ID NO 12608463 as cited in SEQ ID NO 60238

SEQ ID NO: 112035 - protein, 498 aa, Arabidopsis thaliana; identical to SEQ ID NO: 100796
  peptide (1)..(498): Ceres Seq. ID no. 13606083

SEQ ID NO: 112036 - protein, 496 aa, Arabidopsis thaliana; identical to SEQ ID NO: 100797
  peptide (1)..(496): Ceres Seq. ID no. 13606084

SEQ ID NO: 112037 - protein, 379 aa, Arabidopsis thaliana; identical to SEQ ID NO: 100798
  peptide (1)..(379): Ceres Seq. ID no. 13606085

SEQ ID NO: 112038 - DNA, 1278 bp, Arabidopsis thaliana; identical to SEQ ID NO: 100799
  misc_feature (1)..(1278): Ceres Seq. ID no. 13606090
  misc_feature (1)..(1278): Ortholog of  Ceres SEQ ID NO 15176016 as cited in SEQ ID NO 56593

SEQ ID NO: 112039 - protein, 358 aa, Arabidopsis thaliana; identical to SEQ ID NO: 100800
  peptide (1)..(358): Ceres Seq. ID no. 13606091

SEQ ID NO: 112040 - protein, 316 aa, Arabidopsis thaliana; identical to SEQ ID NO: 100801
  peptide (1)..(316): Ceres Seq. ID no. 13606092

SEQ ID NO: 112041 - protein, 314 aa, Arabidopsis thaliana; identical to SEQ ID NO: 100802
  peptide (1)..(314): Ceres Seq. ID no. 13606093

SEQ ID NO: 112042 - DNA, 2870 bp, Arabidopsis thaliana; identical to SEQ ID NO: 100803
  misc_feature (1)..(2870): Ceres Seq. ID no. 13606098
  misc_feature (1)..(2870): Ortholog of  Ceres SEQ ID NO 14306410 as cited in SEQ ID NO 53870

SEQ ID NO: 112043 - protein, 341 aa, Arabidopsis thaliana; identical to SEQ ID NO: 100804
  peptide (1)..(341): Ceres Seq. ID no. 13606099

SEQ ID NO: 112044 - protein, 340 aa, Arabidopsis thaliana; identical to SEQ ID NO: 100805
  peptide (1)..(340): Ceres Seq. ID no. 13606100

SEQ ID NO: 112045 - protein, 308 aa, Arabidopsis thaliana; identical to SEQ ID NO: 100806
  peptide (1)..(308): Ceres Seq. ID no. 13606101

SEQ ID NO: 112046 - DNA, 1373 bp, Arabidopsis thaliana; identical to SEQ ID NO: 100807
  misc_feature (1)..(1373): Ceres Seq. ID no. 13606112
  misc_feature (1)..(1373): Ortholog of  Ceres SEQ ID NO 14311477 as cited in SEQ ID NO 51390
  misc_feature (1)..(1373): Ortholog of  Ceres SEQ ID NO 14302840 as cited in SEQ ID NO 62295
  misc_feature (1)..(1373): Ortholog of  Ceres SEQ ID NO 13596892 as cited in SEQ ID NO 62900

SEQ ID NO: 112047 - protein, 404 aa, Arabidopsis thaliana; identical to SEQ ID NO: 100808
  peptide (1)..(404): Ceres Seq. ID no. 13606113

SEQ ID NO: 112048 - protein, 389 aa, Arabidopsis thaliana; identical to SEQ ID NO: 100809
  peptide (1)..(389): Ceres Seq. ID no. 13606114

SEQ ID NO: 112049 - protein, 381 aa, Arabidopsis thaliana; identical to SEQ ID NO: 100810
  peptide (1)..(381): Ceres Seq. ID no. 13606115

SEQ ID NO: 112050 - DNA, 1259 bp, Arabidopsis thaliana; identical to SEQ ID NO: 100811
  misc_feature (1)..(1259): Ceres Seq. ID no. 13606118
  misc_feature (1)..(1259): Ortholog of  Ceres SEQ ID NO 12636774 as cited in SEQ ID NO 372
  misc_feature (1)..(1259): Ortholog of  Ceres SEQ ID NO 15174842 as cited in SEQ ID NO 53054
  misc_feature (1)..(1259): Ortholog of  Ceres SEQ ID NO 13582350 as cited in SEQ ID NO 56734
  misc_feature (1)..(1259): Ortholog of  Ceres SEQ ID NO 12476493 as cited in SEQ ID NO 58163
  misc_feature (1)..(1259): Ortholog of  Ceres SEQ ID NO 13596470 as cited in SEQ ID NO 62158
  misc_feature (1)..(1259): Ortholog of  Ceres SEQ ID NO 12578315 as cited in SEQ ID NO 62451
  misc_feature (1)..(1259): Ortholog of  Ceres SEQ ID NO 12615466 as cited in SEQ ID NO 62761
  misc_feature (1)..(1259): Ortholog of  Ceres SEQ ID NO 12615907 as cited in SEQ ID NO 62860
  misc_feature (1)..(1259): Ortholog of  Ceres SEQ ID NO 13597295 as cited in SEQ ID NO 63743
  misc_feature (1)..(1259): Ortholog of  Ceres SEQ ID NO 12617090 as cited in SEQ ID NO 64005
  misc_feature (1)..(1259): Ortholog of  Ceres SEQ ID NO 13597439 as cited in SEQ ID NO 64081
  misc_feature (1)..(1259): Ortholog of  Ceres SEQ ID NO 13597233 as cited in SEQ ID NO 64370

SEQ ID NO: 112051 - protein, 359 aa, Arabidopsis thaliana; identical to SEQ ID NO: 100812
  peptide (1)..(359): Ceres Seq. ID no. 13606119

SEQ ID NO: 112052 - protein, 348 aa, Arabidopsis thaliana; identical to SEQ ID NO: 100813
  peptide (1)..(348): Ceres Seq. ID no. 13606120

SEQ ID NO: 112053 - protein, 317 aa, Arabidopsis thaliana; identical to SEQ ID NO: 100814
  peptide (1)..(317): Ceres Seq. ID no. 13606121

SEQ ID NO: 112054 - DNA, 1355 bp, Arabidopsis thaliana; identical to SEQ ID NO: 100815
  misc_feature (1)..(1355): Ceres Seq. ID no. 13606133
  misc_feature (1)..(1355): Ortholog of  Ceres SEQ ID NO 13596039 as cited in SEQ ID NO 62117

SEQ ID NO: 112055 - protein, 410 aa, Arabidopsis thaliana; identical to SEQ ID NO: 100816
  peptide (1)..(410): Ceres Seq. ID no. 13606134

SEQ ID NO: 112056 - protein, 388 aa, Arabidopsis thaliana; identical to SEQ ID NO: 100817
  peptide (1)..(388): Ceres Seq. ID no. 13606135

SEQ ID NO: 112057 - protein, 312 aa, Arabidopsis thaliana; identical to SEQ ID NO: 100818
  peptide (1)..(312): Ceres Seq. ID no. 13606136

SEQ ID NO: 112058 - DNA, 3027 bp, Arabidopsis thaliana; identical to SEQ ID NO: 100819
  misc_feature (1)..(3027): Ceres Seq. ID no. 13606137
  misc_feature (1)..(3027): Ortholog of  Ceres SEQ ID NO 12586556 as cited in SEQ ID NO 64667
  misc_feature (1)..(3027): Ortholog of  Ceres SEQ ID NO 13660894 as cited in SEQ ID NO 67475

SEQ ID NO: 112059 - protein, 970 aa, Arabidopsis thaliana; identical to SEQ ID NO: 100820
  peptide (1)..(970): Ceres Seq. ID no. 13606138

SEQ ID NO: 112060 - protein, 869 aa, Arabidopsis thaliana; identical to SEQ ID NO: 100821
  peptide (1)..(869): Ceres Seq. ID no. 13606139

SEQ ID NO: 112061 - protein, 842 aa, Arabidopsis thaliana; identical to SEQ ID NO: 100822
  peptide (1)..(842): Ceres Seq. ID no. 13606140

SEQ ID NO: 112062 - DNA, 1106 bp, Arabidopsis thaliana; identical to SEQ ID NO: 100823
  misc_feature (1)..(1106): Ceres Seq. ID no. 13606141
  misc_feature (1)..(1106): Ortholog of  Ceres SEQ ID NO 13504028 as cited in SEQ ID NO 56107

SEQ ID NO: 112063 - protein, 282 aa, Arabidopsis thaliana [sequence omitted]

SEQ ID NO: 112064 - protein, 259 aa, Arabidopsis thaliana; identical to SEQ ID NO: 100825
  peptide (1)..(259): Ceres Seq. ID no. 13606143

SEQ ID NO: 112065 - protein, 227 aa, Arabidopsis thaliana; identical to SEQ ID NO: 100826
  peptide (1)..(227): Ceres Seq. ID no. 13606144

SEQ ID NO: 112066 - DNA, 1579 bp, Arabidopsis thaliana; identical to SEQ ID NO: 100827
  misc_feature (1)..(1579): Ceres Seq. ID no. 13606145
  misc_feature (1)..(1579): Ortholog of  Ceres SEQ ID NO 12611159 as cited in SEQ ID NO 59821

SEQ ID NO: 112067 - protein, 352 aa, Arabidopsis thaliana; identical to SEQ ID NO: 100828
  peptide (1)..(352): Ceres Seq. ID no. 13606146

SEQ ID NO: 112068 - DNA, 636 bp, Arabidopsis thaliana; identical to SEQ ID NO: 100829
  misc_feature (1)..(636): Ceres Seq. ID no. 13606157
  misc_feature (1)..(636): Ortholog of  Ceres SEQ ID NO 12556889 as cited in SEQ ID NO 125
  misc_feature (1)..(636): Ortholog of  Ceres SEQ ID NO 15172982 as cited in SEQ ID NO 51725
  misc_feature (1)..(636): Ortholog of  Ceres SEQ ID NO 13598188 as cited in SEQ ID NO 61498

SEQ ID NO: 112069 - protein, 140 aa, Arabidopsis thaliana; identical to SEQ ID NO: 22821
  peptide (1)..(140): Ceres Seq. ID no. 13606158

SEQ ID NO: 112070 - DNA, 1444 bp, Arabidopsis thaliana; identical to SEQ ID NO: 100831
  misc_feature (1)..(1444): Ceres Seq. ID no. 13606170
  misc_feature (1)..(1444): Ortholog of  Ceres SEQ ID NO 13597407 as cited in SEQ ID NO 64106

SEQ ID NO: 112071 - protein, 460 aa, Arabidopsis thaliana; identical to SEQ ID NO: 100832
  peptide (1)..(460): Ceres Seq. ID no. 13606171

SEQ ID NO: 112072 - protein, 454 aa, Arabidopsis thaliana; identical to SEQ ID NO: 100833
  peptide (1)..(454): Ceres Seq. ID no. 13606172

SEQ ID NO: 112073 - protein, 409 aa, Arabidopsis thaliana; identical to SEQ ID NO: 100834
  peptide (1)..(409): Ceres Seq. ID no. 13606173

SEQ ID NO: 112074 - DNA, 1817 bp, Arabidopsis thaliana; identical to SEQ ID NO: 100835
  misc_feature (1)..(1817): Ceres Seq. ID no. 13606174
  misc_feature (1)..(1817): Ortholog of  Ceres SEQ ID NO 13597407 as cited in SEQ ID NO 64106

SEQ ID NO: 112075 - protein, 470 aa, Arabidopsis thaliana; identical to SEQ ID NO: 29899
  peptide (1)..(470): Ceres Seq. ID no. 13606175

SEQ ID NO: 112076 - protein, 468 aa, Arabidopsis thaliana; identical to SEQ ID NO: 29900
  peptide (1)..(468): Ceres Seq. ID no. 13606176

SEQ ID NO: 112077 - protein, 398 aa, Arabidopsis thaliana; identical to SEQ ID NO: 29901
  peptide (1)..(398): Ceres Seq. ID no. 13606177

SEQ ID NO: 112078 - DNA, 1595 bp, Arabidopsis thaliana; identical to SEQ ID NO: 100839
  misc_feature (1)..(1595): Ceres Seq. ID no. 13606178
  misc_feature (1)..(1595): Ortholog of  Ceres SEQ ID NO 12586556 as cited in SEQ ID NO 64667
  misc_feature (1)..(1595): Ortholog of  Ceres SEQ ID NO 13660894 as cited in SEQ ID NO 67475

SEQ ID NO: 112079 - protein, 484 aa, Arabidopsis thaliana; identical to SEQ ID NO: 100840
  peptide (1)..(484): Ceres Seq. ID no. 13606179

SEQ ID NO: 112080 - protein, 412 aa, Arabidopsis thaliana; identical to SEQ ID NO: 100841
  peptide (1)..(412): Ceres Seq. ID no. 13606180

SEQ ID NO: 112081 - protein, 392 aa, Arabidopsis thaliana; identical to SEQ ID NO: 100842
  peptide (1)..(392): Ceres Seq. ID no. 13606181

SEQ ID NO: 112082 - DNA, 1213 bp, Arabidopsis thaliana; identical to SEQ ID NO: 100843
  misc_feature (1)..(1213): Ceres Seq. ID no. 13606182
  misc_feature (1)..(1213): Ortholog of  Ceres SEQ ID NO 14302306 as cited in SEQ ID NO 62834
  misc_feature (1)..(1213): Ortholog of  Ceres SEQ ID NO 14303305 as cited in SEQ ID NO 0

SEQ ID NO: 112083 - protein, 320 aa, Arabidopsis thaliana; identical to SEQ ID NO: 23804
  peptide (1)..(320): Ceres Seq. ID no. 13606183

SEQ ID NO: 112084 - protein, 267 aa, Arabidopsis thaliana; identical to SEQ ID NO: 23805
  peptide (1)..(267): Ceres Seq. ID no. 13606184

SEQ ID NO: 112085 - DNA, 951 bp, Arabidopsis thaliana; identical to SEQ ID NO: 100846
  misc_feature (1)..(951): Ceres Seq. ID no. 13606185
  misc_feature (1)..(951): Ortholog of  Ceres SEQ ID NO 12578688 as cited in SEQ ID NO 27

SEQ ID NO: 112086 - protein, 207 aa, Arabidopsis thaliana; identical to SEQ ID NO: 100847
  peptide (1)..(207): Ceres Seq. ID no. 13606186

SEQ ID NO: 112087 - DNA, 1564 bp, Arabidopsis thaliana; identical to SEQ ID NO: 100848
  misc_feature (1)..(1564): Ceres Seq. ID no. 13606187
  misc_feature (1)..(1564): Ortholog of  Ceres SEQ ID NO 15170461 as cited in SEQ ID NO 52853
  misc_feature (1)..(1564): Ortholog of  Ceres SEQ ID NO 13595351 as cited in SEQ ID NO 55934
  misc_feature (1)..(1564): Ortholog of  Ceres SEQ ID NO 13595513 as cited in SEQ ID NO 56663
  misc_feature (1)..(1564): Ortholog of  Ceres SEQ ID NO 13639645 as cited in SEQ ID NO 57488

SEQ ID NO: 112088 - protein, 374 aa, Arabidopsis thaliana; identical to SEQ ID NO: 25010
  peptide (1)..(374): Ceres Seq. ID no. 13606188

SEQ ID NO: 112089 - protein, 369 aa, Arabidopsis thaliana; identical to SEQ ID NO: 25011
  peptide (1)..(369): Ceres Seq. ID no. 13606189

SEQ ID NO: 112090 - protein, 363 aa, Arabidopsis thaliana; identical to SEQ ID NO: 25012
  peptide (1)..(363): Ceres Seq. ID no. 13606190

SEQ ID NO: 112091 - DNA, 1129 bp, Arabidopsis thaliana; identical to SEQ ID NO: 100852
  misc_feature (1)..(1129): Ceres Seq. ID no. 13606191
  misc_feature (1)..(1129): Ortholog of  Ceres SEQ ID NO 15177031 as cited in SEQ ID NO 60171
  misc_feature (1)..(1129): Ortholog of  Ceres SEQ ID NO 12617197 as cited in SEQ ID NO 63406
  misc_feature (1)..(1129): Ortholog of  Ceres SEQ ID NO 13597804 as cited in SEQ ID NO 64182
  misc_feature (1)..(1129): Ortholog of  Ceres SEQ ID NO 15179788 as cited in SEQ ID NO 64818
  misc_feature (1)..(1129): Ortholog of  Ceres SEQ ID NO 14301622 as cited in SEQ ID NO 65156
  misc_feature (1)..(1129): Ortholog of  Ceres SEQ ID NO 13598565 as cited in SEQ ID NO 65250
  misc_feature (1)..(1129): Ortholog of  Ceres SEQ ID NO 13598597 as cited in SEQ ID NO 65496
  misc_feature (1)..(1129): Ortholog of  Ceres SEQ ID NO 13596284 as cited in SEQ ID NO 68273

SEQ ID NO: 112092 - protein, 336 aa, Arabidopsis thaliana; identical to SEQ ID NO: 100853
  peptide (1)..(336): Ceres Seq. ID no. 13606192

SEQ ID NO: 112093 - protein, 322 aa, Arabidopsis thaliana; identical to SEQ ID NO: 22010
  peptide (1)..(322): Ceres Seq. ID no. 13606193

SEQ ID NO: 112094 - DNA, 2402 bp, Arabidopsis thaliana; identical to SEQ ID NO: 100855
  misc_feature (1)..(2402): Ceres Seq. ID no. 13606194
  misc_feature (1)..(2402): Ortholog of  Ceres SEQ ID NO 13657677 as cited in SEQ ID NO 66119

SEQ ID NO: 112095 - protein, 766 aa, Arabidopsis thaliana; identical to SEQ ID NO: 100856
  peptide (1)..(766): Ceres Seq. ID no. 13606195

SEQ ID NO: 112096 - protein, 763 aa, Arabidopsis thaliana; identical to SEQ ID NO: 100857
  peptide (1)..(763): Ceres Seq. ID no. 13606196

SEQ ID NO: 112097 - protein, 602 aa, Arabidopsis thaliana; identical to SEQ ID NO: 100858
  peptide (1)..(602): Ceres Seq. ID no. 13606197

SEQ ID NO: 112098 - DNA, 954 bp, Arabidopsis thaliana; identical to SEQ ID NO: 100859
  misc_feature (1)..(954): Ceres Seq. ID no. 13606198
  misc_feature (1)..(954): Ortholog of  Ceres SEQ ID NO 14302705 as cited in SEQ ID NO 56264

SEQ ID NO: 112099 - protein, 241 aa, Arabidopsis thaliana; identical to SEQ ID NO: 100860
  peptide (1)..(241): Ceres Seq. ID no. 13606199

SEQ ID NO: 112100 - protein, 223 aa, Arabidopsis thaliana; identical to SEQ ID NO: 100861
  peptide (1)..(223): Ceres Seq. ID no. 13606200

SEQ ID NO: 112101 - protein, 202 aa, Arabidopsis thaliana; identical to SEQ ID NO: 100862
  peptide (1)..(202): Ceres Seq. ID no. 13606201

SEQ ID NO: 112102 - DNA, 1227 bp, Arabidopsis thaliana; identical to SEQ ID NO: 100863
  misc_feature (1)..(1227): Ceres Seq. ID no. 13606202
  misc_feature (1)..(1227): Ortholog of  Ceres SEQ ID NO 13582619 as cited in SEQ ID NO 56520
  misc_feature (1)..(1227): Ortholog of  Ceres SEQ ID NO 14315846 as cited in SEQ ID NO 58094
  misc_feature (1)..(1227): Ortholog of  Ceres SEQ ID NO 13660872 as cited in SEQ ID NO 60830
  misc_feature (1)..(1227): Ortholog of  Ceres SEQ ID NO 12616221 as cited in SEQ ID NO 63291

SEQ ID NO: 112103 - protein, 345 aa, Arabidopsis thaliana; identical to SEQ ID NO: 100864
  peptide (1)..(345): Ceres Seq. ID no. 13606203

SEQ ID NO: 112104 - protein, 334 aa, Arabidopsis thaliana; identical to SEQ ID NO: 100865
  peptide (1)..(334): Ceres Seq. ID no. 13606204

SEQ ID NO: 112105 - protein, 276 aa, Arabidopsis thaliana; identical to SEQ ID NO: 100866
  peptide (1)..(276): Ceres Seq. ID no. 13606205

SEQ ID NO: 112106 - DNA, 1853 bp, Arabidopsis thaliana; identical to SEQ ID NO: 100867
  misc_feature (1)..(1853): Ceres Seq. ID no. 13606237
  misc_feature (1)..(1853): Ortholog of  Ceres SEQ ID NO 15169670 as cited in SEQ ID NO 62085

SEQ ID NO: 112107 - protein, 533 aa, Arabidopsis thaliana; identical to SEQ ID NO: 100868
  peptide (1)..(533): Ceres Seq. ID no. 13606238

SEQ ID NO: 112108 - protein, 493 aa, Arabidopsis thaliana; identical to SEQ ID NO: 100869
  peptide (1)..(493): Ceres Seq. ID no. 13606239

SEQ ID NO: 112109 - protein, 423 aa, Arabidopsis thaliana; identical to SEQ ID NO: 100870
  peptide (1)..(423): Ceres Seq. ID no. 13606240

SEQ ID NO: 112110 - DNA, 1501 bp, Arabidopsis thaliana; identical to SEQ ID NO: 100871
  misc_feature (1)..(1501): Ceres Seq. ID no. 13606241
  misc_feature (1)..(1501): Ortholog of  Ceres SEQ ID NO 12609045 as cited in SEQ ID NO 51314
  misc_feature (1)..(1501): Ortholog of  Ceres SEQ ID NO 13595877 as cited in SEQ ID NO 67702
  misc_feature (1)..(1501): Ortholog of  Ceres SEQ ID NO 13654367 as cited in SEQ ID NO 67993
  misc_feature (1)..(1501): Ortholog of  Ceres SEQ ID NO 13622667 as cited in SEQ ID NO 0

SEQ ID NO: 112111 - protein, 344 aa, Arabidopsis thaliana; identical to SEQ ID NO: 100872
  peptide (1)..(344): Ceres Seq. ID no. 13606242

SEQ ID NO: 112112 - DNA, 2313 bp, Arabidopsis thaliana; identical to SEQ ID NO: 100873
  misc_feature (1)..(2313): Ceres Seq. ID no. 13606243
  misc_feature (1)..(2313): Ortholog of  Ceres SEQ ID NO 13597706 as cited in SEQ ID NO 65326

SEQ ID NO: 112113 - protein, 700 aa, Arabidopsis thaliana; identical to SEQ ID NO: 100874
  peptide (1)..(700): Ceres Seq. ID no. 13606244

SEQ ID NO: 112114 - protein, 582 aa, Arabidopsis thaliana; identical to SEQ ID NO: 100875
  peptide (1)..(582): Ceres Seq. ID no. 13606245

SEQ ID NO: 112115 - protein, 379 aa, Arabidopsis thaliana; identical to SEQ ID NO: 100876
  peptide (1)..(379): Ceres Seq. ID no. 13606246

SEQ ID NO: 112116 - DNA, 851 bp, Arabidopsis thaliana; identical to SEQ ID NO: 100877
  misc_feature (1)..(851): Ceres Seq. ID no. 13606251
  misc_feature (1)..(851): Ortholog of  Ceres SEQ ID NO 12627109 as cited in SEQ ID NO 66391

SEQ ID NO: 112117 - protein, 129 aa, Arabidopsis thaliana; identical to SEQ ID NO: 100878
  peptide (1)..(129): Ceres Seq. ID no. 13606252

SEQ ID NO: 112118 - protein, 115 aa, Arabidopsis thaliana; identical to SEQ ID NO: 24997
  peptide (1)..(115): Ceres Seq. ID no. 13606253

SEQ ID NO: 112119 - protein, 94 aa, Arabidopsis thaliana; identical to SEQ ID NO: 24998
  peptide (1)..(94): Ceres Seq. ID no. 13606254

SEQ ID NO: 112120 - DNA, 1871 bp, Arabidopsis thaliana; identical to SEQ ID NO: 100881
  misc_feature (1)..(1871): Ceres Seq. ID no. 13606271
  misc_feature (1)..(1871): Ortholog of  Ceres SEQ ID NO 13596198 as cited in SEQ ID NO 68488

SEQ ID NO: 112121 - protein, 563 aa, Arabidopsis thaliana; identical to SEQ ID NO: 100882
  peptide (1)..(563): Ceres Seq. ID no. 13606272

SEQ ID NO: 112122 - protein, 560 aa, Arabidopsis thaliana; identical to SEQ ID NO: 100883
  peptide (1)..(560): Ceres Seq. ID no. 13606273

SEQ ID NO: 112123 - protein, 467 aa, Arabidopsis thaliana; identical to SEQ ID NO: 100884
  peptide (1)..(467): Ceres Seq. ID no. 13606274

SEQ ID NO: 112124 - DNA, 1748 bp, Arabidopsis thaliana; identical to SEQ ID NO: 100885
  misc_feature (1)..(1748): Ceres Seq. ID no. 13606275
  misc_feature (1)..(1748): Ortholog of  Ceres SEQ ID NO 15178246 as cited in SEQ ID NO 52038

SEQ ID NO: 112125 - protein, 414 aa, Arabidopsis thaliana; identical to SEQ ID NO: 100886
  peptide (1)..(414): Ceres Seq. ID no. 13606276

SEQ ID NO: 112126 - protein, 379 aa, Arabidopsis thaliana; identical to SEQ ID NO: 24982
  peptide (1)..(379): Ceres Seq. ID no. 13606277

SEQ ID NO: 112127 - protein, 367 aa, Arabidopsis thaliana; identical to SEQ ID NO: 24983
  peptide (1)..(367): Ceres Seq. ID no. 13606278

SEQ ID NO: 112128 - DNA, 1287 bp, Arabidopsis thaliana; identical to SEQ ID NO: 100889
  misc_feature (1)..(1287): Ceres Seq. ID no. 13606300
  misc_feature (1)..(1287): Ortholog of  Ceres SEQ ID NO 14308359 as cited in SEQ ID NO 55097
  misc_feature (1)..(1287): Ortholog of  Ceres SEQ ID NO 15169195 as cited in SEQ ID NO 55200
  misc_feature (1)..(1287): Ortholog of  Ceres SEQ ID NO 13581611 as cited in SEQ ID NO 59028
  misc_feature (1)..(1287): Ortholog of  Ceres SEQ ID NO 13596689 as cited in SEQ ID NO 62728
  misc_feature (1)..(1287): Ortholog of  Ceres SEQ ID NO 14302142 as cited in SEQ ID NO 0

SEQ ID NO: 112129 - protein, 366 aa, Arabidopsis thaliana; identical to SEQ ID NO: 100890
  peptide (1)..(366): Ceres Seq. ID no. 13606301

SEQ ID NO: 112130 - protein, 356 aa, Arabidopsis thaliana; identical to SEQ ID NO: 100891
  peptide (1)..(356): Ceres Seq. ID no. 13606302

SEQ ID NO: 112131 - protein, 336 aa, Arabidopsis thaliana; identical to SEQ ID NO: 100892
  peptide (1)..(336): Ceres Seq. ID no. 13606303

SEQ ID NO: 112132 - DNA, 1620 bp, Arabidopsis thaliana; identical to SEQ ID NO: 100893
  misc_feature (1)..(1620): Ceres Seq. ID no. 13606304
  misc_feature (1)..(1620): Ortholog of  Ceres SEQ ID NO 12625831 as cited in SEQ ID NO 65139

SEQ ID NO: 112133 - protein, 414 aa, Arabidopsis thaliana; identical to SEQ ID NO: 100894
  peptide (1)..(414): Ceres Seq. ID no. 13606305

SEQ ID NO: 112134 - protein, 391 aa, Arabidopsis thaliana; identical to SEQ ID NO: 100895
  peptide (1)..(391): Ceres Seq. ID no. 13606306

SEQ ID NO: 112135 - protein, 342 aa, Arabidopsis thaliana; identical to SEQ ID NO: 100896
  peptide (1)..(342): Ceres Seq. ID no. 13606307

SEQ ID NO: 112136 - DNA, 958 bp, Arabidopsis thaliana; identical to SEQ ID NO: 100897
  misc_feature (1)..(958): Ceres Seq. ID no. 13606308
  misc_feature (1)..(958): Ortholog of  Ceres SEQ ID NO 13656286 as cited in SEQ ID NO 69168
  misc_feature (1)..(958): Ortholog of  Ceres SEQ ID NO 15174351 as cited in SEQ ID NO 0

SEQ ID NO: 112137 - protein, 190 aa, Arabidopsis thaliana; identical to SEQ ID NO: 24619
  peptide (1)..(190): Ceres Seq. ID no. 13606309

SEQ ID NO: 112138 - protein, 180 aa, Arabidopsis thaliana; identical to SEQ ID NO: 24620
  peptide (1)..(180): Ceres Seq. ID no. 13606310

SEQ ID NO: 112139 - DNA, 1384 bp, Arabidopsis thaliana; identical to SEQ ID NO: 100900
  misc_feature (1)..(1384): Ceres Seq. ID no. 13606315
  misc_feature (1)..(1384): Ortholog of  Ceres SEQ ID NO 13639663 as cited in SEQ ID NO 57850
  misc_feature (1)..(1384): Ortholog of  Ceres SEQ ID NO 15224330 as cited in SEQ ID NO 58808

SEQ ID NO: 112140 - protein, 349 aa, Arabidopsis thaliana; identical to SEQ ID NO: 23763
  peptide (1)..(349): Ceres Seq. ID no. 13606316

SEQ ID NO: 112141 - protein, 323 aa, Arabidopsis thaliana; identical to SEQ ID NO: 23764
  peptide (1)..(323): Ceres Seq. ID no. 13606317

SEQ ID NO: 112142 - protein, 321 aa, Arabidopsis thaliana; identical to SEQ ID NO: 23765
  peptide (1)..(321): Ceres Seq. ID no. 13606318

SEQ ID NO: 112143 - DNA, 809 bp, Arabidopsis thaliana; identical to SEQ ID NO: 100904
  misc_feature (1)..(809): Ceres Seq. ID no. 13606331
  misc_feature (1)..(809): Ortholog of  Ceres SEQ ID NO 15178534 as cited in SEQ ID NO 65306

SEQ ID NO: 112144 - protein, 214 aa, Arabidopsis thaliana; identical to SEQ ID NO: 100905
  peptide (1)..(214): Ceres Seq. ID no. 13606332

SEQ ID NO: 112145 - protein, 197 aa, Arabidopsis thaliana; identical to SEQ ID NO: 100906
  peptide (1)..(197): Ceres Seq. ID no. 13606333

SEQ ID NO: 112146 - protein, 172 aa, Arabidopsis thaliana; identical to SEQ ID NO: 100907
  peptide (1)..(172): Ceres Seq. ID no. 13606334

SEQ ID NO: 112147 - DNA, 603 bp, Arabidopsis thaliana; identical to SEQ ID NO: 100908
  misc_feature (1)..(603): Ceres Seq. ID no. 13606339
  misc_feature (1)..(603): Ortholog of  Ceres SEQ ID NO 14316118 as cited in SEQ ID NO 52391
  misc_feature (1)..(603): Ortholog of  Ceres SEQ ID NO 14316060 as cited in SEQ ID NO 52465
  misc_feature (1)..(603): Ortholog of  Ceres SEQ ID NO 15177246 as cited in SEQ ID NO 57731
  misc_feature (1)..(603): Ortholog of  Ceres SEQ ID NO 13664032 as cited in SEQ ID NO 67527

SEQ ID NO: 112148 - protein, 176 aa, Arabidopsis thaliana; identical to SEQ ID NO: 100909
  peptide (1)..(176): Ceres Seq. ID no. 13606340

SEQ ID NO: 112149 - protein, 161 aa, Arabidopsis thaliana; identical to SEQ ID NO: 100910
  peptide (1)..(161): Ceres Seq. ID no. 13606341

SEQ ID NO: 112150 - protein, 127 aa, Arabidopsis thaliana; identical to SEQ ID NO: 100911
  peptide (1)..(127): Ceres Seq. ID no. 13606342

SEQ ID NO: 112151 - DNA, 1363 bp, Arabidopsis thaliana; identical to SEQ ID NO: 100912
  misc_feature (1)..(1363): Ceres Seq. ID no. 13606343
  misc_feature (1)..(1363): Ortholog of  Ceres SEQ ID NO 13593889 as cited in SEQ ID NO 53305
  misc_feature (1)..(1363): Ortholog of  Ceres SEQ ID NO 13581959 as cited in SEQ ID NO 56156

SEQ ID NO: 112152 - protein, 364 aa, Arabidopsis thaliana; identical to SEQ ID NO: 100913
  peptide (1)..(364): Ceres Seq. ID no. 13606344

SEQ ID NO: 112153 - protein, 232 aa, Arabidopsis thaliana; identical to SEQ ID NO: 100914
  peptide (1)..(232): Ceres Seq. ID no. 13606345

SEQ ID NO: 112154 - DNA, 927 bp, Arabidopsis thaliana; identical to SEQ ID NO: 100915
  misc_feature (1)..(927): Ceres Seq. ID no. 13606346
  misc_feature (1)..(927): Ortholog of  Ceres SEQ ID NO 14307839 as cited in SEQ ID NO 54379
  misc_feature (1)..(927): Ortholog of  Ceres SEQ ID NO 13596109 as cited in SEQ ID NO 68619

SEQ ID NO: 112155 - protein, 275 aa, Arabidopsis thaliana; identical to SEQ ID NO: 100916
  peptide (1)..(275): Ceres Seq. ID no. 13606347

SEQ ID NO: 112156 - protein, 183 aa, Arabidopsis thaliana; identical to SEQ ID NO: 100917
  peptide (1)..(183): Ceres Seq. ID no. 13606348

SEQ ID NO: 112157 - protein, 153 aa, Arabidopsis thaliana; identical to SEQ ID NO: 100918
  peptide (1)..(153): Ceres Seq. ID no. 13606349

SEQ ID NO: 112158 - DNA, 1713 bp, Arabidopsis thaliana; identical to SEQ ID NO: 100919
  misc_feature (1)..(1713): Ceres Seq. ID no. 13606350
  misc_feature (1)..(1713): Ortholog of  Ceres SEQ ID NO 13654989 as cited in SEQ ID NO 63117
  misc_feature (1)..(1713): Ortholog of  Ceres SEQ ID NO 13584744 as cited in SEQ ID NO 69137

SEQ ID NO: 112159 - protein, 492 aa, Arabidopsis thaliana; identical to SEQ ID NO: 100920
  peptide (1)..(492): Ceres Seq. ID no. 13606351

SEQ ID NO: 112160 - protein, 358 aa, Arabidopsis thaliana; identical to SEQ ID NO: 100921
  peptide (1)..(358): Ceres Seq. ID no. 13606352

SEQ ID NO: 112161 - protein, 307 aa, Arabidopsis thaliana; identical to SEQ ID NO: 100922
  peptide (1)..(307): Ceres Seq. ID no. 13606353

SEQ ID NO: 112162 - DNA, 1393 bp, Arabidopsis thaliana; identical to SEQ ID NO: 100923
  misc_feature (1)..(1393): Ceres Seq. ID no. 13606354
  misc_feature (1)..(1393): Ortholog of  Ceres SEQ ID NO 14310350 as cited in SEQ ID NO 20670
  misc_feature (1)..(1393): Ortholog of  Ceres SEQ ID NO 15177648 as cited in SEQ ID NO 58917

SEQ ID NO: 112163 - protein, 416 aa, Arabidopsis thaliana; identical to SEQ ID NO: 27485
  peptide (1)..(416): Ceres Seq. ID no. 13606355

SEQ ID NO: 112164 - protein, 411 aa, Arabidopsis thaliana; identical to SEQ ID NO: 27486
  peptide (1)..(411): Ceres Seq. ID no. 13606356

SEQ ID NO: 112165 - protein, 366 aa, Arabidopsis thaliana; identical to SEQ ID NO: 27487
  peptide (1)..(366): Ceres Seq. ID no. 13606357

SEQ ID NO: 112166 - DNA, 1509 bp, Arabidopsis thaliana; identical to SEQ ID NO: 100927
  misc_feature (1)..(1509): Ceres Seq. ID no. 13606366
  misc_feature (1)..(1509): Ortholog of  Ceres SEQ ID NO 13497992 as cited in SEQ ID NO 58175

SEQ ID NO: 112167 - protein, 365 aa, Arabidopsis thaliana; identical to SEQ ID NO: 100928
  peptide (1)..(365): Ceres Seq. ID no. 13606367

SEQ ID NO: 112168 - protein, 311 aa, Arabidopsis thaliana; identical to SEQ ID NO: 100929
  peptide (1)..(311): Ceres Seq. ID no. 13606368

SEQ ID NO: 112169 - protein, 275 aa, Arabidopsis thaliana; identical to SEQ ID NO: 100930
  peptide (1)..(275): Ceres Seq. ID no. 13606369

SEQ ID NO: 112170 - DNA, 1016 bp, Arabidopsis thaliana; identical to SEQ ID NO: 100931
  misc_feature (1)..(1016): Ceres Seq. ID no. 13606386
  misc_feature (1)..(1016): Ortholog of  Ceres SEQ ID NO 13595568 as cited in SEQ ID NO 56764

SEQ ID NO: 112171 - protein, 314 aa, Arabidopsis thaliana; identical to SEQ ID NO: 100932
  peptide (1)..(314): Ceres Seq. ID no. 13606387

SEQ ID NO: 112172 - protein, 289 aa, Arabidopsis thaliana; identical to SEQ ID NO: 100933
  peptide (1)..(289): Ceres Seq. ID no. 13606388

SEQ ID NO: 112173 - protein, 287 aa, Arabidopsis thaliana; identical to SEQ ID NO: 100934
  peptide (1)..(287): Ceres Seq. ID no. 13606389

SEQ ID NO: 112174 - DNA, 2215 bp, Arabidopsis thaliana; identical to SEQ ID NO: 100935
  misc_feature (1)..(2215): Ceres Seq. ID no. 13606402
  misc_feature (1)..(2215): Ortholog of  Ceres SEQ ID NO 13654290 as cited in SEQ ID NO 62197
  misc_feature (1)..(2215): Ortholog of  Ceres SEQ ID NO 14301924 as cited in SEQ ID NO 67731

SEQ ID NO: 112175 - protein, 637 aa, Arabidopsis thaliana; identical to SEQ ID NO: 100936
  peptide (1)..(637): Ceres Seq. ID no. 13606403

SEQ ID NO: 112176 - protein, 607 aa, Arabidopsis thaliana; identical to SEQ ID NO: 100937
  peptide (1)..(607): Ceres Seq. ID no. 13606404

SEQ ID NO: 112177 - protein, 606 aa, Arabidopsis thaliana; identical to SEQ ID NO: 100938
  peptide (1)..(606): Ceres Seq. ID no. 13606405

SEQ ID NO: 112178 - DNA, 1779 bp, Arabidopsis thaliana; identical to SEQ ID NO: 100939
  misc_feature (1)..(1779): Ceres Seq. ID no. 13606418
  misc_feature (1)..(1779): Ortholog of  Ceres SEQ ID NO 13585587 as cited in SEQ ID NO 65515

SEQ ID NO: 112179 - protein, 498 aa, Arabidopsis thaliana; identical to SEQ ID NO: 100940
  peptide (1)..(498): Ceres Seq. ID no. 13606419

SEQ ID NO: 112180 - protein, 489 aa, Arabidopsis thaliana; identical to SEQ ID NO: 100941
  peptide (1)..(489): Ceres Seq. ID no. 13606420

SEQ ID NO: 112181 - protein, 320 aa, Arabidopsis thaliana; identical to SEQ ID NO: 100942
  peptide (1)..(320): Ceres Seq. ID no. 13606421

SEQ ID NO: 112182 - DNA, 2859 bp, Arabidopsis thaliana; identical to SEQ ID NO: 100943
  misc_feature (1)..(2859): Ceres Seq. ID no. 13606442
  misc_feature (1)..(2859): Ortholog of  Ceres SEQ ID NO 15177203 as cited in SEQ ID NO 54018

SEQ ID NO: 112183 - protein, 911 aa, Arabidopsis thaliana; identical to SEQ ID NO: 100944
  peptide (1)..(911): Ceres Seq. ID no. 13606443

SEQ ID NO: 112184 - protein, 880 aa, Arabidopsis thaliana; identical to SEQ ID NO: 100945
  peptide (1)..(880): Ceres Seq. ID no. 13606444

SEQ ID NO: 112185 - protein, 787 aa, Arabidopsis thaliana; identical to SEQ ID NO: 100946
  peptide (1)..(787): Ceres Seq. ID no. 13606445

SEQ ID NO: 112186 - DNA, 1152 bp, Arabidopsis thaliana; identical to SEQ ID NO: 100947
  misc_feature (1)..(1152): Ceres Seq. ID no. 13606454
  misc_feature (1)..(1152): Ortholog of  Ceres SEQ ID NO 15174669 as cited in SEQ ID NO 59656

SEQ ID NO: 112187 - protein, 336 aa, Arabidopsis thaliana; identical to SEQ ID NO: 100948
  peptide (1)..(336): Ceres Seq. ID no. 13606455

SEQ ID NO: 112188 - protein, 326 aa, Arabidopsis thaliana; identical to SEQ ID NO: 23514
  peptide (1)..(326): Ceres Seq. ID no. 13606456

SEQ ID NO: 112189 - protein, 188 aa, Arabidopsis thaliana; identical to SEQ ID NO: 23515
  peptide (1)..(188): Ceres Seq. ID no. 13606457

SEQ ID NO: 112190 - DNA, 1751 bp, Arabidopsis thaliana; identical to SEQ ID NO: 100951
  misc_feature (1)..(1751): Ceres Seq. ID no. 13606478
  misc_feature (1)..(1751): Ortholog of  Ceres SEQ ID NO 13662164 as cited in SEQ ID NO 67158
  misc_feature (1582)..(1582): n is a, c, t, g, unknown, or other
  misc_feature (1609)..(1609): n is a, c, t, g, unknown, or other

SEQ ID NO: 112191 - protein, 498 aa, Arabidopsis thaliana; identical to SEQ ID NO: 100952
  peptide (1)..(498): Ceres Seq. ID no. 13606479

SEQ ID NO: 112192 - protein, 475 aa, Arabidopsis thaliana; identical to SEQ ID NO: 100953
  peptide (1)..(475): Ceres Seq. ID no. 13606480

SEQ ID NO: 112193 - protein, 361 aa, Arabidopsis thaliana; identical to SEQ ID NO: 78151
  peptide (1)..(361): Ceres Seq. ID no. 13606481

SEQ ID NO: 112194 - DNA, 2015 bp, Arabidopsis thaliana; identical to SEQ ID NO: 100955
  misc_feature (1)..(2015): Ceres Seq. ID no. 13606506
  misc_feature (1)..(2015): Ortholog of  Ceres SEQ ID NO 15174638 as cited in SEQ ID NO 53185
  misc_feature (1)..(2015): Ortholog of  Ceres SEQ ID NO 13657460 as cited in SEQ ID NO 66115
  misc_feature (1)..(2015): Ortholog of  Ceres SEQ ID NO 13659394 as cited in SEQ ID NO 67049

SEQ ID NO: 112195 - protein, 523 aa, Arabidopsis thaliana; identical to SEQ ID NO: 100956
  peptide (1)..(523): Ceres Seq. ID no. 13606507

SEQ ID NO: 112196 - protein, 507 aa, Arabidopsis thaliana; identical to SEQ ID NO: 100957
  peptide (1)..(507): Ceres Seq. ID no. 13606508

SEQ ID NO: 112197 - protein, 491 aa, Arabidopsis thaliana; identical to SEQ ID NO: 100958
  peptide (1)..(491): Ceres Seq. ID no. 13606509

SEQ ID NO: 112198 - DNA, 1238 bp, Arabidopsis thaliana; identical to SEQ ID NO: 100959
  misc_feature (1)..(1238): Ceres Seq. ID no. 13606510
  misc_feature (1)..(1238): Ortholog of  Ceres SEQ ID NO 13638097 as cited in SEQ ID NO 57043
  misc_feature (1)..(1238): Ortholog of  Ceres SEQ ID NO 13596416 as cited in SEQ ID NO 62177
  misc_feature (1)..(1238): Ortholog of  Ceres SEQ ID NO 13659338 as cited in SEQ ID NO 66875

SEQ ID NO: 112199 - protein, 341 aa, Arabidopsis thaliana; identical to SEQ ID NO: 100960
  peptide (1)..(341): Ceres Seq. ID no. 13606511

SEQ ID NO: 112200 - protein, 324 aa, Arabidopsis thaliana; identical to SEQ ID NO: 100961
  peptide (1)..(324): Ceres Seq. ID no. 13606512

SEQ ID NO: 112201 - DNA, 2295 bp, Arabidopsis thaliana; identical to SEQ ID NO: 100962
  misc_feature (1)..(2295): Ceres Seq. ID no. 13606516
  misc_feature (1)..(2295): Ortholog of  Ceres SEQ ID NO 13595900 as cited in SEQ ID NO 69289

SEQ ID NO: 112202 - protein, 691 aa, Arabidopsis thaliana; identical to SEQ ID NO: 100963
  peptide (1)..(691): Ceres Seq. ID no. 13606517

SEQ ID NO: 112203 - protein, 594 aa, Arabidopsis thaliana; identical to SEQ ID NO: 100964
  peptide (1)..(594): Ceres Seq. ID no. 13606518

SEQ ID NO: 112204 - protein, 479 aa, Arabidopsis thaliana; identical to SEQ ID NO: 100965
  peptide (1)..(479): Ceres Seq. ID no. 13606519

SEQ ID NO: 112205 - DNA, 1817 bp, Arabidopsis thaliana; identical to SEQ ID NO: 100966
  misc_feature (1)..(1817): Ceres Seq. ID no. 13606552
  misc_feature (1)..(1817): Ortholog of  Ceres SEQ ID NO 15178767 as cited in SEQ ID NO 55317

SEQ ID NO: 112206 - protein, 436 aa, Arabidopsis thaliana; identical to SEQ ID NO: 100967
  peptide (1)..(436): Ceres Seq. ID no. 13606553

SEQ ID NO: 112207 - protein, 371 aa, Arabidopsis thaliana; identical to SEQ ID NO: 100968
  peptide (1)..(371): Ceres Seq. ID no. 13606554

SEQ ID NO: 112208 - protein, 363 aa, Arabidopsis thaliana; identical to SEQ ID NO: 100969
  peptide (1)..(363): Ceres Seq. ID no. 13606555

SEQ ID NO: 112209 - DNA, 1836 bp, Arabidopsis thaliana; identical to SEQ ID NO: 100970
  misc_feature (1)..(1836): Ceres Seq. ID no. 13606566
  misc_feature (1)..(1836): Ortholog of  Ceres SEQ ID NO 14309715 as cited in SEQ ID NO 55353
  misc_feature (1)..(1836): Ortholog of  Ceres SEQ ID NO 13595521 as cited in SEQ ID NO 59840

SEQ ID NO: 112210 - protein, 552 aa, Arabidopsis thaliana; identical to SEQ ID NO: 100971
  peptide (1)..(552): Ceres Seq. ID no. 13606567

SEQ ID NO: 112211 - protein, 531 aa, Arabidopsis thaliana; identical to SEQ ID NO: 100972
  peptide (1)..(531): Ceres Seq. ID no. 13606568

SEQ ID NO: 112212 - protein, 466 aa, Arabidopsis thaliana; identical to SEQ ID NO: 100973
  peptide (1)..(466): Ceres Seq. ID no. 13606569

SEQ ID NO: 112213 - DNA, 1615 bp, Arabidopsis thaliana; identical to SEQ ID NO: 100974
  misc_feature (1)..(1615): Ceres Seq. ID no. 13606570
  misc_feature (1)..(1615): Ortholog of  Ceres SEQ ID NO 14311854 as cited in SEQ ID NO 51455
  misc_feature (1)..(1615): Ortholog of  Ceres SEQ ID NO 14313097 as cited in SEQ ID NO 58902

SEQ ID NO: 112214 - protein, 393 aa, Arabidopsis thaliana; identical to SEQ ID NO: 100975
  peptide (1)..(393): Ceres Seq. ID no. 13606571

SEQ ID NO: 112215 - protein, 343 aa, Arabidopsis thaliana; identical to SEQ ID NO: 100976
  peptide (1)..(343): Ceres Seq. ID no. 13606572

SEQ ID NO: 112216 - protein, 305 aa, Arabidopsis thaliana; identical to SEQ ID NO: 100977
  peptide (1)..(305): Ceres Seq. ID no. 13606573

SEQ ID NO: 112217 - DNA, 1661 bp, Arabidopsis thaliana; identical to SEQ ID NO: 100978
  misc_feature (1)..(1661): Ceres Seq. ID no. 13606582
  misc_feature (1)..(1661): Ortholog of  Ceres SEQ ID NO 13594380 as cited in SEQ ID NO 58039
  misc_feature (1)..(1661): Ortholog of  Ceres SEQ ID NO 13597407 as cited in SEQ ID NO 64106
  misc_feature (1)..(1661): Ortholog of  Ceres SEQ ID NO 15180690 as cited in SEQ ID NO 0

SEQ ID NO: 112218 - protein, 506 aa, Arabidopsis thaliana; identical to SEQ ID NO: 100979
  peptide (1)..(506): Ceres Seq. ID no. 13606583

SEQ ID NO: 112219 - protein, 481 aa, Arabidopsis thaliana; identical to SEQ ID NO: 100980
  peptide (1)..(481): Ceres Seq. ID no. 13606584

SEQ ID NO: 112220 - protein, 456 aa, Arabidopsis thaliana; identical to SEQ ID NO: 100981
  peptide (1)..(456): Ceres Seq. ID no. 13606585

SEQ ID NO: 112221 - DNA, 1810 bp, Arabidopsis thaliana; identical to SEQ ID NO: 100982
  misc_feature (1)..(1810): Ceres Seq. ID no. 13606592
  misc_feature (1)..(1810): Ortholog of  Ceres SEQ ID NO 15177324 as cited in SEQ ID NO 52621

SEQ ID NO: 112222 - protein, 407 aa, Arabidopsis thaliana; identical to SEQ ID NO: 100983
  peptide (1)..(407): Ceres Seq. ID no. 13606593

SEQ ID NO: 112223 - protein, 322 aa, Arabidopsis thaliana; identical to SEQ ID NO: 100984
  peptide (1)..(322): Ceres Seq. ID no. 13606594

SEQ ID NO: 112224 - protein, 261 aa, Arabidopsis thaliana; identical to SEQ ID NO: 100985
  peptide (1)..(261): Ceres Seq. ID no. 13606595

SEQ ID NO: 112225 - DNA, 1182 bp, Arabidopsis thaliana; identical to SEQ ID NO: 100986
  misc_feature (1)..(1182): Ceres Seq. ID no. 13606610
  misc_feature (1)..(1182): Ortholog of  Ceres SEQ ID NO 14314371 as cited in SEQ ID NO 52260

SEQ ID NO: 112226 - protein, 320 aa, Arabidopsis thaliana; identical to SEQ ID NO: 100987
  peptide (1)..(320): Ceres Seq. ID no. 13606611

SEQ ID NO: 112227 - protein, 306 aa, Arabidopsis thaliana; identical to SEQ ID NO: 100988
  peptide (1)..(306): Ceres Seq. ID no. 13606612

SEQ ID NO: 112228 - protein, 282 aa, Arabidopsis thaliana; identical to SEQ ID NO: 100989
  peptide (1)..(282): Ceres Seq. ID no. 13606613

SEQ ID NO: 112229 - DNA, 881 bp, Arabidopsis thaliana; identical to SEQ ID NO: 100990
  misc_feature (1)..(881): Ceres Seq. ID no. 13606614
  misc_feature (1)..(881): Ortholog of  Ceres SEQ ID NO 14306299 as cited in SEQ ID NO 56895
  misc_feature (1)..(881): Ortholog of  Ceres SEQ ID NO 13663631 as cited in SEQ ID NO 67073

SEQ ID NO: 112230 - protein, 190 aa, Arabidopsis thaliana; identical to SEQ ID NO: 100991
  peptide (1)..(190): Ceres Seq. ID no. 13606615

SEQ ID NO: 112231 - DNA, 1929 bp, Arabidopsis thaliana; identical to SEQ ID NO: 100992
  misc_feature (1)..(1929): Ceres Seq. ID no. 13606623
  misc_feature (1)..(1929): Ortholog of  Ceres SEQ ID NO 15177316 as cited in SEQ ID NO 52739

SEQ ID NO: 112232 - protein, 587 aa, Arabidopsis thaliana; identical to SEQ ID NO: 100993
  peptide (1)..(587): Ceres Seq. ID no. 13606624

SEQ ID NO: 112233 - protein, 581 aa, Arabidopsis thaliana; identical to SEQ ID NO: 100994
  peptide (1)..(581): Ceres Seq. ID no. 13606625

SEQ ID NO: 112234 - protein, 491 aa, Arabidopsis thaliana; identical to SEQ ID NO: 75851
  peptide (1)..(491): Ceres Seq. ID no. 13606626

SEQ ID NO: 112235 - DNA, 1339 bp, Arabidopsis thaliana; identical to SEQ ID NO: 100996
  misc_feature (1)..(1339): Ceres Seq. ID no. 13606634
  misc_feature (1)..(1339): Ortholog of  Ceres SEQ ID NO 13594037 as cited in SEQ ID NO 55666
  misc_feature (1)..(1339): Ortholog of  Ceres SEQ ID NO 15171501 as cited in SEQ ID NO 58322

SEQ ID NO: 112236 - protein, 383 aa, Arabidopsis thaliana; identical to SEQ ID NO: 100997
  peptide (1)..(383): Ceres Seq. ID no. 13606635

SEQ ID NO: 112237 - protein, 341 aa, Arabidopsis thaliana; identical to SEQ ID NO: 100998
  peptide (1)..(341): Ceres Seq. ID no. 13606636

SEQ ID NO: 112238 - protein, 326 aa, Arabidopsis thaliana; identical to SEQ ID NO: 100999
  peptide (1)..(326): Ceres Seq. ID no. 13606637

SEQ ID NO: 112239 - DNA, 1333 bp, Arabidopsis thaliana; identical to SEQ ID NO: 101000
  misc_feature (1)..(1333): Ceres Seq. ID no. 13606642
  misc_feature (1)..(1333): Ortholog of  Ceres SEQ ID NO 13598741 as cited in SEQ ID NO 62749
  misc_feature (1)..(1333): Ortholog of  Ceres SEQ ID NO 12587535 as cited in SEQ ID NO 64020
  misc_feature (1)..(1333): Ortholog of  Ceres SEQ ID NO 12586366 as cited in SEQ ID NO 68983

SEQ ID NO: 112240 - protein, 383 aa, Arabidopsis thaliana; identical to SEQ ID NO: 101001
  peptide (1)..(383): Ceres Seq. ID no. 13606643

SEQ ID NO: 112241 - DNA, 1156 bp, Arabidopsis thaliana; identical to SEQ ID NO: 101002
  misc_feature (1)..(1156): Ceres Seq. ID no. 13606660
  misc_feature (1)..(1156): Ortholog of  Ceres SEQ ID NO 14314838 as cited in SEQ ID NO 52573

SEQ ID NO: 112242 - protein, 284 aa, Arabidopsis thaliana; identical to SEQ ID NO: 101003
  peptide (1)..(284): Ceres Seq. ID no. 13606661

SEQ ID NO: 112243 - protein, 268 aa, Arabidopsis thaliana; identical to SEQ ID NO: 101004
  peptide (1)..(268): Ceres Seq. ID no. 13606662

SEQ ID NO: 112244 - protein, 252 aa, Arabidopsis thaliana; identical to SEQ ID NO: 101005
  peptide (1)..(252): Ceres Seq. ID no. 13606663

SEQ ID NO: 112245 - DNA, 857 bp, Arabidopsis thaliana; identical to SEQ ID NO: 101006
  misc_feature (1)..(857): Ceres Seq. ID no. 13606675
  misc_feature (1)..(857): Ortholog of  Ceres SEQ ID NO 13594418 as cited in SEQ ID NO 60153

SEQ ID NO: 112246 - protein, 185 aa, Arabidopsis thaliana; identical to SEQ ID NO: 40575
  peptide (1)..(185): Ceres Seq. ID no. 13606676

SEQ ID NO: 112247 - protein, 151 aa, Arabidopsis thaliana; identical to SEQ ID NO: 40576
  peptide (1)..(151): Ceres Seq. ID no. 13606677

SEQ ID NO: 112248 - DNA, 528 bp, Arabidopsis thaliana; identical to SEQ ID NO: 101009
  misc_feature (1)..(528): Ceres Seq. ID no. 13606678
  misc_feature (1)..(528): Ortholog of  Ceres SEQ ID NO 15179080 as cited in SEQ ID NO 0

SEQ ID NO: 112249 - protein, 124 aa, Arabidopsis thaliana; identical to SEQ ID NO: 29652
  peptide (1)..(124): Ceres Seq. ID no. 13606679

SEQ ID NO: 112250 - protein, 102 aa, Arabidopsis thaliana; identical to SEQ ID NO: 29653
  peptide (1)..(102): Ceres Seq. ID no. 13606680

SEQ ID NO: 112251 - DNA, 867 bp, Arabidopsis thaliana; identical to SEQ ID NO: 101012
  misc_feature (1)..(867): Ceres Seq. ID no. 13606681
  misc_feature (1)..(867): Ortholog of  Ceres SEQ ID NO 13638595 as cited in SEQ ID NO 52050
  misc_feature (1)..(867): Ortholog of  Ceres SEQ ID NO 14301870 as cited in SEQ ID NO 61501
  misc_feature (1)..(867): Ortholog of  Ceres SEQ ID NO 12583993 as cited in SEQ ID NO 68098

SEQ ID NO: 112252 - protein, 208 aa, Arabidopsis thaliana; identical to SEQ ID NO: 23207
  peptide (1)..(208): Ceres Seq. ID no. 13606682

SEQ ID NO: 112253 - protein, 110 aa, Arabidopsis thaliana; identical to SEQ ID NO: 31047
  peptide (1)..(110): Ceres Seq. ID no. 13606683

SEQ ID NO: 112254 - DNA, 1827 bp, Arabidopsis thaliana; identical to SEQ ID NO: 101015
  misc_feature (1)..(1827): Ceres Seq. ID no. 13606699
  misc_feature (1)..(1827): Ortholog of  Ceres SEQ ID NO 15227289 as cited in SEQ ID NO 58851
  misc_feature (1)..(1827): Ortholog of  Ceres SEQ ID NO 13584416 as cited in SEQ ID NO 63441

SEQ ID NO: 112255 - protein, 314 aa, Arabidopsis thaliana; identical to SEQ ID NO: 101016
  peptide (1)..(314): Ceres Seq. ID no. 13606700

SEQ ID NO: 112256 - protein, 301 aa, Arabidopsis thaliana; identical to SEQ ID NO: 101017
  peptide (1)..(301): Ceres Seq. ID no. 13606701

SEQ ID NO: 112257 - protein, 238 aa, Arabidopsis thaliana; identical to SEQ ID NO: 101018
  peptide (1)..(238): Ceres Seq. ID no. 13606702

SEQ ID NO: 112258 - DNA, 1391 bp, Arabidopsis thaliana; identical to SEQ ID NO: 101019
  misc_feature (1)..(1391): Ceres Seq. ID no. 13606707
  misc_feature (1)..(1391): Ortholog of  Ceres SEQ ID NO 13592961 as cited in SEQ ID NO 20522
  misc_feature (1)..(1391): Ortholog of  Ceres SEQ ID NO 12583469 as cited in SEQ ID NO 51031
  misc_feature (1)..(1391): Ortholog of  Ceres SEQ ID NO 13597389 as cited in SEQ ID NO 63426
  misc_feature (1)..(1391): Ortholog of  Ceres SEQ ID NO 15169639 as cited in SEQ ID NO 64624
  misc_feature (1)..(1391): Ortholog of  Ceres SEQ ID NO 14303071 as cited in SEQ ID NO 67114
  misc_feature (1)..(1391): Ortholog of  Ceres SEQ ID NO 13595998 as cited in SEQ ID NO 68161
  misc_feature (1)..(1391): Ortholog of  Ceres SEQ ID NO 14303635 as cited in SEQ ID NO 68503

SEQ ID NO: 112259 - protein, 384 aa, Arabidopsis thaliana; identical to SEQ ID NO: 101020
  peptide (1)..(384): Ceres Seq. ID no. 13606708

SEQ ID NO: 112260 - protein, 219 aa, Arabidopsis thaliana; identical to SEQ ID NO: 101021
  peptide (1)..(219): Ceres Seq. ID no. 13606709

SEQ ID NO: 112261 - protein, 211 aa, Arabidopsis thaliana; identical to SEQ ID NO: 101022
  peptide (1)..(211): Ceres Seq. ID no. 13606710

SEQ ID NO: 112262 - DNA, 1348 bp, Arabidopsis thaliana; identical to SEQ ID NO: 101023
  misc_feature (1)..(1348): Ceres Seq. ID no. 13606711
  misc_feature (1)..(1348): Ortholog of  Ceres SEQ ID NO 14301482 as cited in SEQ ID NO 63355

SEQ ID NO: 112263 - protein, 354 aa, Arabidopsis thaliana; identical to SEQ ID NO: 21698
  peptide (1)..(354): Ceres Seq. ID no. 13606712

SEQ ID NO: 112264 - protein, 209 aa, Arabidopsis thaliana; identical to SEQ ID NO: 21699
  peptide (1)..(209): Ceres Seq. ID no. 13606713

SEQ ID NO: 112265 - protein, 190 aa, Arabidopsis thaliana; identical to SEQ ID NO: 21700
  peptide (1)..(190): Ceres Seq. ID no. 13606714

SEQ ID NO: 112266 - DNA, 1342 bp, Arabidopsis thaliana; identical to SEQ ID NO: 101027
  misc_feature (1)..(1342): Ceres Seq. ID no. 13606727
  misc_feature (1)..(1342): Ortholog of  Ceres SEQ ID NO 13596816 as cited in SEQ ID NO 62287

SEQ ID NO: 112267 - protein, 412 aa, Arabidopsis thaliana; identical to SEQ ID NO: 101028
  peptide (1)..(412): Ceres Seq. ID no. 13606728

SEQ ID NO: 112268 - protein, 397 aa, Arabidopsis thaliana; identical to SEQ ID NO: 101029
  peptide (1)..(397): Ceres Seq. ID no. 13606729

SEQ ID NO: 112269 - protein, 276 aa, Arabidopsis thaliana; identical to SEQ ID NO: 101030
  peptide (1)..(276): Ceres Seq. ID no. 13606730

SEQ ID NO: 112270 - DNA, 1328 bp, Arabidopsis thaliana; identical to SEQ ID NO: 101031
  misc_feature (1)..(1328): Ceres Seq. ID no. 13606731
  misc_feature (1)..(1328): Ortholog of  Ceres SEQ ID NO 15171293 as cited in SEQ ID NO 51744

SEQ ID NO: 112271 - protein, 368 aa, Arabidopsis thaliana; identical to SEQ ID NO: 101032
  peptide (1)..(368): Ceres Seq. ID no. 13606732

SEQ ID NO: 112272 - protein, 362 aa, Arabidopsis thaliana; identical to SEQ ID NO: 101033
  peptide (1)..(362): Ceres Seq. ID no. 13606733

SEQ ID NO: 112273 - protein, 349 aa, Arabidopsis thaliana; identical to SEQ ID NO: 101034
  peptide (1)..(349): Ceres Seq. ID no. 13606734

SEQ ID NO: 112274 - DNA, 1954 bp, Arabidopsis thaliana; identical to SEQ ID NO: 101035
  misc_feature (1)..(1954): Ceres Seq. ID no. 13606739
  misc_feature (1)..(1954): Ortholog of  Ceres SEQ ID NO 15171446 as cited in SEQ ID NO 51590
  misc_feature (1)..(1954): Ortholog of  Ceres SEQ ID NO 14310907 as cited in SEQ ID NO 54338

SEQ ID NO: 112275 - protein, 575 aa, Arabidopsis thaliana; identical to SEQ ID NO: 101036
  peptide (1)..(575): Ceres Seq. ID no. 13606740

SEQ ID NO: 112276 - protein, 566 aa, Arabidopsis thaliana; identical to SEQ ID NO: 101037
  peptide (1)..(566): Ceres Seq. ID no. 13606741

SEQ ID NO: 112277 - protein, 486 aa, Arabidopsis thaliana; identical to SEQ ID NO: 101038
  peptide (1)..(486): Ceres Seq. ID no. 13606742

SEQ ID NO: 112278 - DNA, 1132 bp, Arabidopsis thaliana; identical to SEQ ID NO: 101039
  misc_feature (1)..(1132): Ceres Seq. ID no. 13606777
  misc_feature (1)..(1132): Ortholog of  Ceres SEQ ID NO 14305022 as cited in SEQ ID NO 53586
  misc_feature (1)..(1132): Ortholog of  Ceres SEQ ID NO 12506279 as cited in SEQ ID NO 55440
  misc_feature (1)..(1132): Ortholog of  Ceres SEQ ID NO 13654847 as cited in SEQ ID NO 62459
  misc_feature (1)..(1132): Ortholog of  Ceres SEQ ID NO 15174357 as cited in SEQ ID NO 0

SEQ ID NO: 112279 - protein, 283 aa, Arabidopsis thaliana; identical to SEQ ID NO: 101040
  peptide (1)..(283): Ceres Seq. ID no. 13606778

SEQ ID NO: 112280 - DNA, 3062 bp, Arabidopsis thaliana; identical to SEQ ID NO: 101041
  misc_feature (1)..(3062): Ceres Seq. ID no. 13606782
  misc_feature (1)..(3062): Ortholog of  Ceres SEQ ID NO 13581686 as cited in SEQ ID NO 57695
  misc_feature (1)..(3062): Ortholog of  Ceres SEQ ID NO 15224315 as cited in SEQ ID NO 66131

SEQ ID NO: 112281 - protein, 902 aa, Arabidopsis thaliana; identical to SEQ ID NO: 101042
  peptide (1)..(902): Ceres Seq. ID no. 13606783

SEQ ID NO: 112282 - protein, 901 aa, Arabidopsis thaliana; identical to SEQ ID NO: 101043
  peptide (1)..(901): Ceres Seq. ID no. 13606784

SEQ ID NO: 112283 - protein, 896 aa, Arabidopsis thaliana; identical to SEQ ID NO: 101044
  peptide (1)..(896): Ceres Seq. ID no. 13606785

SEQ ID NO: 112284 - DNA, 772 bp, Arabidopsis thaliana; identical to SEQ ID NO: 101045
  misc_feature (1)..(772): Ceres Seq. ID no. 13606786
  misc_feature (1)..(772): Ortholog of  Ceres SEQ ID NO 15171175 as cited in SEQ ID NO 57476
  misc_feature (1)..(772): Ortholog of  Ceres SEQ ID NO 15178436 as cited in SEQ ID NO 57919
  misc_feature (1)..(772): Ortholog of  Ceres SEQ ID NO 13655808 as cited in SEQ ID NO 64901

SEQ ID NO: 112285 - protein, 216 aa, Arabidopsis thaliana; identical to SEQ ID NO: 101046
  peptide (1)..(216): Ceres Seq. ID no. 13606787

SEQ ID NO: 112286 - protein, 208 aa, Arabidopsis thaliana; identical to SEQ ID NO: 101047
  peptide (1)..(208): Ceres Seq. ID no. 13606788

SEQ ID NO: 112287 - protein, 201 aa, Arabidopsis thaliana; identical to SEQ ID NO: 101048
  peptide (1)..(201): Ceres Seq. ID no. 13606789

SEQ ID NO: 112288 - DNA, 715 bp, Arabidopsis thaliana; identical to SEQ ID NO: 101049
  misc_feature (1)..(715): Ceres Seq. ID no. 13606793
  misc_feature (1)..(715): Ortholog of  Ceres SEQ ID NO 12471935 as cited in SEQ ID NO 122
  misc_feature (1)..(715): Ortholog of  Ceres SEQ ID NO 13594582 as cited in SEQ ID NO 51986
  misc_feature (1)..(715): Ortholog of  Ceres SEQ ID NO 13661310 as cited in SEQ ID NO 61077
  misc_feature (1)..(715): Ortholog of  Ceres SEQ ID NO 13599572 as cited in SEQ ID NO 0

SEQ ID NO: 112289 - protein, 163 aa, Arabidopsis thaliana; identical to SEQ ID NO: 101050
  peptide (1)..(163): Ceres Seq. ID no. 13606794

SEQ ID NO: 112290 - protein, 153 aa, Arabidopsis thaliana; identical to SEQ ID NO: 101051
  peptide (1)..(153): Ceres Seq. ID no. 13606795

SEQ ID NO: 112291 - protein, 122 aa, Arabidopsis thaliana; identical to SEQ ID NO: 101052
  peptide (1)..(122): Ceres Seq. ID no. 13606796

SEQ ID NO: 112292 - DNA, 1114 bp, Arabidopsis thaliana; identical to SEQ ID NO: 101053
  misc_feature (1)..(1114): Ceres Seq. ID no. 13606820
  misc_feature (1)..(1114): Ortholog of  Ceres SEQ ID NO 13664220 as cited in SEQ ID NO 61151
  misc_feature (1)..(1114): Ortholog of  Ceres SEQ ID NO 13597477 as cited in SEQ ID NO 65160

SEQ ID NO: 112293 - protein, 329 aa, Arabidopsis thaliana; identical to SEQ ID NO: 101054
  peptide (1)..(329): Ceres Seq. ID no. 13606821

SEQ ID NO: 112294 - protein, 328 aa, Arabidopsis thaliana; identical to SEQ ID NO: 88599
  peptide (1)..(328): Ceres Seq. ID no. 13606822

SEQ ID NO: 112295 - DNA, 1662 bp, Arabidopsis thaliana; identical to SEQ ID NO: 101056
  misc_feature (1)..(1662): Ceres Seq. ID no. 13606823
  misc_feature (1)..(1662): Ortholog of  Ceres SEQ ID NO 13594209 as cited in SEQ ID NO 59089
  misc_feature (1)..(1662): Ortholog of  Ceres SEQ ID NO 13664173 as cited in SEQ ID NO 61223
  misc_feature (1)..(1662): Ortholog of  Ceres SEQ ID NO 15169599 as cited in SEQ ID NO 66096
  misc_feature (1)..(1662): Ortholog of  Ceres SEQ ID NO 13502874 as cited in SEQ ID NO 66298
  misc_feature (1)..(1662): Ortholog of  Ceres SEQ ID NO 12614124 as cited in SEQ ID NO 68392
  misc_feature (1)..(1662): Ortholog of  Ceres SEQ ID NO 14308011 as cited in SEQ ID NO 69234

SEQ ID NO: 112296 - protein, 500 aa, Arabidopsis thaliana; identical to SEQ ID NO: 43749
  peptide (1)..(500): Ceres Seq. ID no. 13606824

SEQ ID NO: 112297 - protein, 487 aa, Arabidopsis thaliana; identical to SEQ ID NO: 43750
  peptide (1)..(487): Ceres Seq. ID no. 13606825

SEQ ID NO: 112298 - protein, 471 aa, Arabidopsis thaliana; identical to SEQ ID NO: 43751
  peptide (1)..(471): Ceres Seq. ID no. 13606826

SEQ ID NO: 112299 - DNA, 775 bp, Arabidopsis thaliana; identical to SEQ ID NO: 101060
  misc_feature (1)..(775): Ceres Seq. ID no. 13606831
  misc_feature (1)..(775): Ortholog of  Ceres SEQ ID NO 12556792 as cited in SEQ ID NO 37
  misc_feature (1)..(775): Ortholog of  Ceres SEQ ID NO 13594143 as cited in SEQ ID NO 58945
  misc_feature (1)..(775): Ortholog of  Ceres SEQ ID NO 12590595 as cited in SEQ ID NO 0
  misc_feature (1)..(775): Ortholog of  Ceres SEQ ID NO 15179171 as cited in SEQ ID NO 0

SEQ ID NO: 112300 - protein, 177 aa, Arabidopsis thaliana; identical to SEQ ID NO: 24967
  peptide (1)..(177): Ceres Seq. ID no. 13606832

SEQ ID NO: 112301 - protein, 100 aa, Arabidopsis thaliana; identical to SEQ ID NO: 24968
  peptide (1)..(100): Ceres Seq. ID no. 13606833

SEQ ID NO: 112302 - DNA, 1078 bp, Arabidopsis thaliana; identical to SEQ ID NO: 101063
  misc_feature (1)..(1078): Ceres Seq. ID no. 13606841
  misc_feature (1)..(1078): Ortholog of  Ceres SEQ ID NO 13594560 as cited in SEQ ID NO 51329
  misc_feature (1)..(1078): Ortholog of  Ceres SEQ ID NO 12613701 as cited in SEQ ID NO 67983

SEQ ID NO: 112303 - protein, 305 aa, Arabidopsis thaliana; identical to SEQ ID NO: 101064
  peptide (1)..(305): Ceres Seq. ID no. 13606842

SEQ ID NO: 112304 - protein, 290 aa, Arabidopsis thaliana; identical to SEQ ID NO: 101065
  peptide (1)..(290): Ceres Seq. ID no. 13606843

SEQ ID NO: 112305 - protein, 280 aa, Arabidopsis thaliana; identical to SEQ ID NO: 101066
  peptide (1)..(280): Ceres Seq. ID no. 13606844

SEQ ID NO: 112306 - DNA, 1255 bp, Arabidopsis thaliana; identical to SEQ ID NO: 101067
  misc_feature (1)..(1255): Ceres Seq. ID no. 13606856
  misc_feature (1)..(1255): Ortholog of  Ceres SEQ ID NO 13502952 as cited in SEQ ID NO 62271
  misc_feature (1)..(1255): Ortholog of  Ceres SEQ ID NO 13502973 as cited in SEQ ID NO 68052
  misc_feature (1)..(1255): Ortholog of  Ceres SEQ ID NO 13596000 as cited in SEQ ID NO 68188

SEQ ID NO: 112307 - protein, 355 aa, Arabidopsis thaliana; identical to SEQ ID NO: 101068
  peptide (1)..(355): Ceres Seq. ID no. 13606857

SEQ ID NO: 112308 - protein, 346 aa, Arabidopsis thaliana; identical to SEQ ID NO: 101069
  peptide (1)..(346): Ceres Seq. ID no. 13606858

SEQ ID NO: 112309 - protein, 340 aa, Arabidopsis thaliana; identical to SEQ ID NO: 101070
  peptide (1)..(340): Ceres Seq. ID no. 13606859

SEQ ID NO: 112310 - DNA, 724 bp, Arabidopsis thaliana; identical to SEQ ID NO: 101071
  misc_feature (1)..(724): Ceres Seq. ID no. 13606860
  misc_feature (1)..(724): Ortholog of  Ceres SEQ ID NO 12557888 as cited in SEQ ID NO 76
  misc_feature (1)..(724): Ortholog of  Ceres SEQ ID NO 15179616 as cited in SEQ ID NO 1061
  misc_feature (1)..(724): Ortholog of  Ceres SEQ ID NO 13664090 as cited in SEQ ID NO 61005
  misc_feature (1)..(724): Ortholog of  Ceres SEQ ID NO 15174400 as cited in SEQ ID NO 0

SEQ ID NO: 112311 - protein, 171 aa, Arabidopsis thaliana; identical to SEQ ID NO: 101072
  peptide (1)..(171): Ceres Seq. ID no. 13606861

SEQ ID NO: 112312 - DNA, 854 bp, Arabidopsis thaliana; identical to SEQ ID NO: 101073
  misc_feature (1)..(854): Ceres Seq. ID no. 13606870
  misc_feature (1)..(854): Ortholog of  Ceres SEQ ID NO 14306264 as cited in SEQ ID NO 1386
  misc_feature (1)..(854): Ortholog of  Ceres SEQ ID NO 15179159 as cited in SEQ ID NO 0

SEQ ID NO: 112313 - protein, 247 aa, Arabidopsis thaliana; identical to SEQ ID NO: 101074
  peptide (1)..(247): Ceres Seq. ID no. 13606871

SEQ ID NO: 112314 - protein, 237 aa, Arabidopsis thaliana; identical to SEQ ID NO: 101075
  peptide (1)..(237): Ceres Seq. ID no. 13606872

SEQ ID NO: 112315 - protein, 222 aa, Arabidopsis thaliana; identical to SEQ ID NO: 101076
  peptide (1)..(222): Ceres Seq. ID no. 13606873

SEQ ID NO: 112316 - DNA, 1408 bp, Arabidopsis thaliana; identical to SEQ ID NO: 101077
  misc_feature (1)..(1408): Ceres Seq. ID no. 13606878
  misc_feature (1)..(1408): Ortholog of  Ceres SEQ ID NO 14313583 as cited in SEQ ID NO 55431
  misc_feature (1)..(1408): Ortholog of  Ceres SEQ ID NO 12617090 as cited in SEQ ID NO 64005
  misc_feature (1)..(1408): Ortholog of  Ceres SEQ ID NO 13597233 as cited in SEQ ID NO 64370
  misc_feature (1)..(1408): Ortholog of  Ceres SEQ ID NO 14302844 as cited in SEQ ID NO 65379
  misc_feature (1)..(1408): Ortholog of  Ceres SEQ ID NO 15226354 as cited in SEQ ID NO 0

SEQ ID NO: 112317 - protein, 341 aa, Arabidopsis thaliana; identical to SEQ ID NO: 101078
  peptide (1)..(341): Ceres Seq. ID no. 13606879

SEQ ID NO: 112318 - protein, 275 aa, Arabidopsis thaliana; identical to SEQ ID NO: 101079
  peptide (1)..(275): Ceres Seq. ID no. 13606880

SEQ ID NO: 112319 - protein, 197 aa, Arabidopsis thaliana; identical to SEQ ID NO: 101080
  peptide (1)..(197): Ceres Seq. ID no. 13606881

SEQ ID NO: 112320 - DNA, 1702 bp, Arabidopsis thaliana; identical to SEQ ID NO: 101081
  misc_feature (1)..(1702): Ceres Seq. ID no. 13606882
  misc_feature (1)..(1702): Ortholog of  Ceres SEQ ID NO 14302458 as cited in SEQ ID NO 66127

SEQ ID NO: 112321 - protein, 509 aa, Arabidopsis thaliana; identical to SEQ ID NO: 101082
  peptide (1)..(509): Ceres Seq. ID no. 13606883

SEQ ID NO: 112322 - protein, 489 aa, Arabidopsis thaliana; identical to SEQ ID NO: 101083
  peptide (1)..(489): Ceres Seq. ID no. 13606884

SEQ ID NO: 112323 - protein, 486 aa, Arabidopsis thaliana; identical to SEQ ID NO: 101084
  peptide (1)..(486): Ceres Seq. ID no. 13606885

SEQ ID NO: 112324 - DNA, 1514 bp, Arabidopsis thaliana; identical to SEQ ID NO: 101085
  misc_feature (1)..(1514): Ceres Seq. ID no. 13606886
  misc_feature (1)..(1514): Ortholog of  Ceres SEQ ID NO 15176596 as cited in SEQ ID NO 55168
  misc_feature (1)..(1514): Ortholog of  Ceres SEQ ID NO 14301576 as cited in SEQ ID NO 62362

SEQ ID NO: 112325 - protein, 381 aa, Arabidopsis thaliana; identical to SEQ ID NO: 101086
  peptide (1)..(381): Ceres Seq. ID no. 13606887

SEQ ID NO: 112326 - protein, 317 aa, Arabidopsis thaliana; identical to SEQ ID NO: 25346
  peptide (1)..(317): Ceres Seq. ID no. 13606888

SEQ ID NO: 112327 - DNA, 1404 bp, Arabidopsis thaliana; identical to SEQ ID NO: 101088
  misc_feature (1)..(1404): Ceres Seq. ID no. 13606889
  misc_feature (1)..(1404): Ortholog of  Ceres SEQ ID NO 13639177 as cited in SEQ ID NO 55952
  misc_feature (1)..(1404): Ortholog of  Ceres SEQ ID NO 13590991 as cited in SEQ ID NO 60658

SEQ ID NO: 112328 - protein, 292 aa, Arabidopsis thaliana; identical to SEQ ID NO: 101089
  peptide (1)..(292): Ceres Seq. ID no. 13606890

SEQ ID NO: 112329 - protein, 244 aa, Arabidopsis thaliana; identical to SEQ ID NO: 101090
  peptide (1)..(244): Ceres Seq. ID no. 13606891

SEQ ID NO: 112330 - DNA, 1544 bp, Arabidopsis thaliana; identical to SEQ ID NO: 101091
  misc_feature (1)..(1544): Ceres Seq. ID no. 13606925
  misc_feature (1)..(1544): Ortholog of  Ceres SEQ ID NO 12465151 as cited in SEQ ID NO 67782

SEQ ID NO: 112331 - protein, 424 aa, Arabidopsis thaliana; identical to SEQ ID NO: 101092
  peptide (1)..(424): Ceres Seq. ID no. 13606926

SEQ ID NO: 112332 - protein, 392 aa, Arabidopsis thaliana; identical to SEQ ID NO: 101093
  peptide (1)..(392): Ceres Seq. ID no. 13606927

SEQ ID NO: 112333 - protein, 344 aa, Arabidopsis thaliana; identical to SEQ ID NO: 101094
  peptide (1)..(344): Ceres Seq. ID no. 13606928

SEQ ID NO: 112334 - DNA, 1948 bp, Arabidopsis thaliana; identical to SEQ ID NO: 101095
  misc_feature (1)..(1948): Ceres Seq. ID no. 13606944
  misc_feature (1)..(1948): Ortholog of  Ceres SEQ ID NO 15175771 as cited in SEQ ID NO 55443

SEQ ID NO: 112335 - protein, 543 aa, Arabidopsis thaliana; identical to SEQ ID NO: 101096
  peptide (1)..(543): Ceres Seq. ID no. 13606945

SEQ ID NO: 112336 - protein, 531 aa, Arabidopsis thaliana; identical to SEQ ID NO: 101097
  peptide (1)..(531): Ceres Seq. ID no. 13606946

SEQ ID NO: 112337 - protein, 515 aa, Arabidopsis thaliana; identical to SEQ ID NO: 101098
  peptide (1)..(515): Ceres Seq. ID no. 13606947

SEQ ID NO: 112338 - DNA, 1612 bp, Arabidopsis thaliana; identical to SEQ ID NO: 101099
  misc_feature (1)..(1612): Ceres Seq. ID no. 13606952
  misc_feature (1)..(1612): Ortholog of  Ceres SEQ ID NO 13597407 as cited in SEQ ID NO 64106
  misc_feature (1)..(1612): Ortholog of  Ceres SEQ ID NO 14303309 as cited in SEQ ID NO 67739

SEQ ID NO: 112339 - protein, 493 aa, Arabidopsis thaliana; identical to SEQ ID NO: 101100
  peptide (1)..(493): Ceres Seq. ID no. 13606953

SEQ ID NO: 112340 - protein, 456 aa, Arabidopsis thaliana; identical to SEQ ID NO: 101101
  peptide (1)..(456): Ceres Seq. ID no. 13606954

SEQ ID NO: 112341 - protein, 452 aa, Arabidopsis thaliana; identical to SEQ ID NO: 101102
  peptide (1)..(452): Ceres Seq. ID no. 13606955

SEQ ID NO: 112342 - DNA, 973 bp, Arabidopsis thaliana; identical to SEQ ID NO: 101103
  misc_feature (1)..(973): Ceres Seq. ID no. 13606956
  misc_feature (1)..(973): Ortholog of  Ceres SEQ ID NO 15175666 as cited in SEQ ID NO 54985
  misc_feature (1)..(973): Ortholog of  Ceres SEQ ID NO 14310460 as cited in SEQ ID NO 55105
  misc_feature (1)..(973): Ortholog of  Ceres SEQ ID NO 13597740 as cited in SEQ ID NO 64482
  misc_feature (1)..(973): Ortholog of  Ceres SEQ ID NO 15179888 as cited in SEQ ID NO 66879
  misc_feature (1)..(973): Ortholog of  Ceres SEQ ID NO 13596056 as cited in SEQ ID NO 68307
  misc_feature (1)..(973): Ortholog of  Ceres SEQ ID NO 12388689 as cited in SEQ ID NO 0

SEQ ID NO: 112343 - protein, 294 aa, Arabidopsis thaliana; identical to SEQ ID NO: 101104
  peptide (1)..(294): Ceres Seq. ID no. 13606957

SEQ ID NO: 112344 - protein, 279 aa, Arabidopsis thaliana; identical to SEQ ID NO: 101105
  peptide (1)..(279): Ceres Seq. ID no. 13606958

SEQ ID NO: 112345 - protein, 247 aa, Arabidopsis thaliana; identical to SEQ ID NO: 101106
  peptide (1)..(247): Ceres Seq. ID no. 13606959

SEQ ID NO: 112346 - DNA, 4777 bp, Arabidopsis thaliana; identical to SEQ ID NO: 101107
  misc_feature (1)..(4777): Ceres Seq. ID no. 13606964
  misc_feature (1)..(4777): Ortholog of  Ceres SEQ ID NO 14310527 as cited in SEQ ID NO 59097

SEQ ID NO: 112347 - protein, 1495 aa, Arabidopsis thaliana; identical to SEQ ID NO: 101108
  peptide (1)..(1495): Ceres Seq. ID no. 13606965

SEQ ID NO: 112348 - protein, 1491 aa, Arabidopsis thaliana; identical to SEQ ID NO: 101109
  peptide (1)..(1491): Ceres Seq. ID no. 13606966

SEQ ID NO: 112349 - protein, 1466 aa, Arabidopsis thaliana; identical to SEQ ID NO: 101110
  peptide (1)..(1466): Ceres Seq. ID no. 13606967

SEQ ID NO: 112350 - DNA, 2325 bp, Arabidopsis thaliana; identical to SEQ ID NO: 101111
  misc_feature (1)..(2325): Ceres Seq. ID no. 13606983
  misc_feature (1)..(2325): Ortholog of  Ceres SEQ ID NO 13598865 as cited in SEQ ID NO 0

SEQ ID NO: 112351 - protein, 695 aa, Arabidopsis thaliana; identical to SEQ ID NO: 101112
  peptide (1)..(695): Ceres Seq. ID no. 13606984

SEQ ID NO: 112352 - protein, 601 aa, Arabidopsis thaliana; identical to SEQ ID NO: 101113
  peptide (1)..(601): Ceres Seq. ID no. 13606985

SEQ ID NO: 112353 - protein, 535 aa, Arabidopsis thaliana; identical to SEQ ID NO: 101114
  peptide (1)..(535): Ceres Seq. ID no. 13606986

SEQ ID NO: 112354 - DNA, 1793 bp, Arabidopsis thaliana; identical to SEQ ID NO: 101115
  misc_feature (1)..(1793): Ceres Seq. ID no. 13606995
  misc_feature (1)..(1793): Ortholog of  Ceres SEQ ID NO 14310592 as cited in SEQ ID NO 55379

SEQ ID NO: 112355 - protein, 545 aa, Arabidopsis thaliana; identical to SEQ ID NO: 101116
  peptide (1)..(545): Ceres Seq. ID no. 13606996

SEQ ID NO: 112356 - protein, 496 aa, Arabidopsis thaliana; identical to SEQ ID NO: 101117
  peptide (1)..(496): Ceres Seq. ID no. 13606997

SEQ ID NO: 112357 - protein, 451 aa, Arabidopsis thaliana; identical to SEQ ID NO: 101118
  peptide (1)..(451): Ceres Seq. ID no. 13606998

SEQ ID NO: 112358 - DNA, 1223 bp, Arabidopsis thaliana; identical to SEQ ID NO: 101119
  misc_feature (1)..(1223): Ceres Seq. ID no. 13606999
  misc_feature (1)..(1223): Ortholog of  Ceres SEQ ID NO 14311163 as cited in SEQ ID NO 56498
  misc_feature (1)..(1223): Ortholog of  Ceres SEQ ID NO 13584722 as cited in SEQ ID NO 65484
  misc_feature (1)..(1223): Ortholog of  Ceres SEQ ID NO 13599293 as cited in SEQ ID NO 0

SEQ ID NO: 112359 - protein, 316 aa, Arabidopsis thaliana; identical to SEQ ID NO: 101120
  peptide (1)..(316): Ceres Seq. ID no. 13607000

SEQ ID NO: 112360 - protein, 231 aa, Arabidopsis thaliana; identical to SEQ ID NO: 101121
  peptide (1)..(231): Ceres Seq. ID no. 13607001

SEQ ID NO: 112361 - DNA, 1288 bp, Arabidopsis thaliana; identical to SEQ ID NO: 101122
  misc_feature (1)..(1288): Ceres Seq. ID no. 13607002
  misc_feature (1)..(1288): Ortholog of  Ceres SEQ ID NO 14308359 as cited in SEQ ID NO 55097
  misc_feature (1)..(1288): Ortholog of  Ceres SEQ ID NO 13581611 as cited in SEQ ID NO 59028
  misc_feature (1)..(1288): Ortholog of  Ceres SEQ ID NO 13596689 as cited in SEQ ID NO 62728
  misc_feature (1)..(1288): Ortholog of  Ceres SEQ ID NO 14302142 as cited in SEQ ID NO 0

SEQ ID NO: 112362 - protein, 366 aa, Arabidopsis thaliana; identical to SEQ ID NO: 100890
  peptide (1)..(366): Ceres Seq. ID no. 13607003

SEQ ID NO: 112363 - protein, 356 aa, Arabidopsis thaliana; identical to SEQ ID NO: 100891
  peptide (1)..(356): Ceres Seq. ID no. 13607004

SEQ ID NO: 112364 - protein, 336 aa, Arabidopsis thaliana; identical to SEQ ID NO: 100892
  peptide (1)..(336): Ceres Seq. ID no. 13607005

SEQ ID NO: 112365 - DNA, 1060 bp, Arabidopsis thaliana; identical to SEQ ID NO: 101126
  misc_feature (1)..(1060): Ceres Seq. ID no. 13607014
  misc_feature (1)..(1060): Ortholog of  Ceres SEQ ID NO 14305750 as cited in SEQ ID NO 52458
  misc_feature (1)..(1060): Ortholog of  Ceres SEQ ID NO 12608276 as cited in SEQ ID NO 57871
  misc_feature (1)..(1060): Ortholog of  Ceres SEQ ID NO 13598492 as cited in SEQ ID NO 63882
  misc_feature (1)..(1060): Ortholog of  Ceres SEQ ID NO 13657914 as cited in SEQ ID NO 66230
  misc_feature (1)..(1060): Ortholog of  Ceres SEQ ID NO 13595877 as cited in SEQ ID NO 67702

SEQ ID NO: 112366 - protein, 318 aa, Arabidopsis thaliana; identical to SEQ ID NO: 101127
  peptide (1)..(318): Ceres Seq. ID no. 13607015

SEQ ID NO: 112367 - protein, 234 aa, Arabidopsis thaliana; identical to SEQ ID NO: 101128
  peptide (1)..(234): Ceres Seq. ID no. 13607016

SEQ ID NO: 112368 - DNA, 1700 bp, Arabidopsis thaliana; identical to SEQ ID NO: 101129
  misc_feature (1)..(1700): Ceres Seq. ID no. 13607036
  misc_feature (1)..(1700): Ortholog of  Ceres SEQ ID NO 15176457 as cited in SEQ ID NO 55547
  misc_feature (1)..(1700): Ortholog of  Ceres SEQ ID NO 13594349 as cited in SEQ ID NO 58161
  misc_feature (1)..(1700): Ortholog of  Ceres SEQ ID NO 13663419 as cited in SEQ ID NO 66561

SEQ ID NO: 112369 - protein, 461 aa, Arabidopsis thaliana; identical to SEQ ID NO: 101130
  peptide (1)..(461): Ceres Seq. ID no. 13607037

SEQ ID NO: 112370 - protein, 342 aa, Arabidopsis thaliana; identical to SEQ ID NO: 101131
  peptide (1)..(342): Ceres Seq. ID no. 13607038

SEQ ID NO: 112371 - protein, 272 aa, Arabidopsis thaliana; identical to SEQ ID NO: 101132
  peptide (1)..(272): Ceres Seq. ID no. 13607039

SEQ ID NO: 112372 - DNA, 2988 bp, Arabidopsis thaliana; identical to SEQ ID NO: 101133
  misc_feature (1)..(2988): Ceres Seq. ID no. 13607040
  misc_feature (1)..(2988): Ortholog of  Ceres SEQ ID NO 12618563 as cited in SEQ ID NO 65025

SEQ ID NO: 112373 - protein, 911 aa, Arabidopsis thaliana; identical to SEQ ID NO: 101134
  peptide (1)..(911): Ceres Seq. ID no. 13607041

SEQ ID NO: 112374 - protein, 790 aa, Arabidopsis thaliana; identical to SEQ ID NO: 101135
  peptide (1)..(790): Ceres Seq. ID no. 13607042

SEQ ID NO: 112375 - protein, 784 aa, Arabidopsis thaliana; identical to SEQ ID NO: 101136
  peptide (1)..(784): Ceres Seq. ID no. 13607043

SEQ ID NO: 112376 - DNA, 1870 bp, Arabidopsis thaliana; identical to SEQ ID NO: 101137
  misc_feature (1)..(1870): Ceres Seq. ID no. 13607048
  misc_feature (1)..(1870): Ortholog of  Ceres SEQ ID NO 13592768 as cited in SEQ ID NO 20317
  misc_feature (1)..(1870): Ortholog of  Ceres SEQ ID NO 14303656 as cited in SEQ ID NO 61363

SEQ ID NO: 112377 - protein, 439 aa, Arabidopsis thaliana; identical to SEQ ID NO: 101138
  peptide (1)..(439): Ceres Seq. ID no. 13607049

SEQ ID NO: 112378 - protein, 301 aa, Arabidopsis thaliana; identical to SEQ ID NO: 101139
  peptide (1)..(301): Ceres Seq. ID no. 13607050

SEQ ID NO: 112379 - protein, 237 aa, Arabidopsis thaliana; identical to SEQ ID NO: 101140
  peptide (1)..(237): Ceres Seq. ID no. 13607051

SEQ ID NO: 112380 - DNA, 592 bp, Arabidopsis thaliana; identical to SEQ ID NO: 101141
  misc_feature (1)..(592): Ceres Seq. ID no. 13607052
  misc_feature (1)..(592): Ortholog of  Ceres SEQ ID NO 14302474 as cited in SEQ ID NO 60589

SEQ ID NO: 112381 - protein, 103 aa, Arabidopsis thaliana; identical to SEQ ID NO: 7737
  peptide (1)..(103): Ceres Seq. ID no. 13607053

SEQ ID NO: 112382 - DNA, 769 bp, Arabidopsis thaliana; identical to SEQ ID NO: 101143
  misc_feature (1)..(769): Ceres Seq. ID no. 13607058
  misc_feature (1)..(769): Ortholog of  Ceres SEQ ID NO 13495070 as cited in SEQ ID NO 53216
  misc_feature (1)..(769): Ortholog of  Ceres SEQ ID NO 12598241 as cited in SEQ ID NO 61025
  misc_feature (1)..(769): Ortholog of  Ceres SEQ ID NO 13661333 as cited in SEQ ID NO 61620
  misc_feature (1)..(769): Ortholog of  Ceres SEQ ID NO 15173749 as cited in SEQ ID NO 61775
  misc_feature (1)..(769): Ortholog of  Ceres SEQ ID NO 13596812 as cited in SEQ ID NO 62283
  misc_feature (1)..(769): Ortholog of  Ceres SEQ ID NO 13623021 as cited in SEQ ID NO 0
  misc_feature (1)..(769): Ortholog of  Ceres SEQ ID NO 14302179 as cited in SEQ ID NO 0

SEQ ID NO: 112383 - protein, 140 aa, Arabidopsis thaliana; identical to SEQ ID NO: 25767
  peptide (1)..(140): Ceres Seq. ID no. 13607059

SEQ ID NO: 112384 - protein, 133 aa, Arabidopsis thaliana; identical to SEQ ID NO: 25768
  peptide (1)..(133): Ceres Seq. ID no. 13607060

SEQ ID NO: 112385 - protein, 99 aa, Arabidopsis thaliana; identical to SEQ ID NO: 25769
  peptide (1)..(99): Ceres Seq. ID no. 13607061

SEQ ID NO: 112386 - DNA, 1289 bp, Arabidopsis thaliana; identical to SEQ ID NO: 101147
  misc_feature (1)..(1289): Ceres Seq. ID no. 13607082
  misc_feature (1)..(1289): Ortholog of  Ceres SEQ ID NO 15171508 as cited in SEQ ID NO 58526
  misc_feature (1)..(1289): Ortholog of  Ceres SEQ ID NO 13654989 as cited in SEQ ID NO 63117
  misc_feature (1)..(1289): Ortholog of  Ceres SEQ ID NO 13584744 as cited in SEQ ID NO 69137

SEQ ID NO: 112387 - protein, 375 aa, Arabidopsis thaliana; identical to SEQ ID NO: 101148
  peptide (1)..(375): Ceres Seq. ID no. 13607083

SEQ ID NO: 112388 - protein, 307 aa, Arabidopsis thaliana; identical to SEQ ID NO: 49872
  peptide (1)..(307): Ceres Seq. ID no. 13607084

SEQ ID NO: 112389 - protein, 270 aa, Arabidopsis thaliana; identical to SEQ ID NO: 49873
  peptide (1)..(270): Ceres Seq. ID no. 13607085

SEQ ID NO: 112390 - DNA, 1667 bp, Arabidopsis thaliana; identical to SEQ ID NO: 101151
  misc_feature (1)..(1667): Ceres Seq. ID no. 13607130
  misc_feature (1)..(1667): Ortholog of  Ceres SEQ ID NO 15171856 as cited in SEQ ID NO 55120

SEQ ID NO: 112391 - protein, 519 aa, Arabidopsis thaliana; identical to SEQ ID NO: 101152
  peptide (1)..(519): Ceres Seq. ID no. 13607131

SEQ ID NO: 112392 - protein, 501 aa, Arabidopsis thaliana; identical to SEQ ID NO: 101153
  peptide (1)..(501): Ceres Seq. ID no. 13607132

SEQ ID NO: 112393 - protein, 495 aa, Arabidopsis thaliana; identical to SEQ ID NO: 101154
  peptide (1)..(495): Ceres Seq. ID no. 13607133

SEQ ID NO: 112394 - DNA, 1916 bp, Arabidopsis thaliana; identical to SEQ ID NO: 101155
  misc_feature (1)..(1916): Ceres Seq. ID no. 13607150
  misc_feature (1)..(1916): Ortholog of  Ceres SEQ ID NO 15172020 as cited in SEQ ID NO 59739

SEQ ID NO: 112395 - protein, 531 aa, Arabidopsis thaliana; identical to SEQ ID NO: 101156
  peptide (1)..(531): Ceres Seq. ID no. 13607151

SEQ ID NO: 112396 - protein, 519 aa, Arabidopsis thaliana; identical to SEQ ID NO: 101157
  peptide (1)..(519): Ceres Seq. ID no. 13607152

SEQ ID NO: 112397 - protein, 449 aa, Arabidopsis thaliana; identical to SEQ ID NO: 101158
  peptide (1)..(449): Ceres Seq. ID no. 13607153

SEQ ID NO: 112398 - DNA, 994 bp, Arabidopsis thaliana; identical to SEQ ID NO: 101159
  misc_feature (1)..(994): Ceres Seq. ID no. 13607158
  misc_feature (1)..(994): Ortholog of  Ceres SEQ ID NO 15176306 as cited in SEQ ID NO 52784
  misc_feature (1)..(994): Ortholog of  Ceres SEQ ID NO 13582624 as cited in SEQ ID NO 56287
  misc_feature (1)..(994): Ortholog of  Ceres SEQ ID NO 13597264 as cited in SEQ ID NO 63897
  misc_feature (1)..(994): Ortholog of  Ceres SEQ ID NO 13598570 as cited in SEQ ID NO 65434
  misc_feature (1)..(994): Ortholog of  Ceres SEQ ID NO 13656452 as cited in SEQ ID NO 65745
  misc_feature (1)..(994): Ortholog of  Ceres SEQ ID NO 13596238 as cited in SEQ ID NO 68834

SEQ ID NO: 112399 - protein, 286 aa, Arabidopsis thaliana; identical to SEQ ID NO: 101160
  peptide (1)..(286): Ceres Seq. ID no. 13607159

SEQ ID NO: 112400 - protein, 277 aa, Arabidopsis thaliana; identical to SEQ ID NO: 101161
  peptide (1)..(277): Ceres Seq. ID no. 13607160

SEQ ID NO: 112401 - protein, 170 aa, Arabidopsis thaliana; identical to SEQ ID NO: 101162
  peptide (1)..(170): Ceres Seq. ID no. 13607161

SEQ ID NO: 112402 - DNA, 803 bp, Arabidopsis thaliana; identical to SEQ ID NO: 101163
  misc_feature (1)..(803): Ceres Seq. ID no. 13607162
  misc_feature (1)..(803): Ortholog of  Ceres SEQ ID NO 13639712 as cited in SEQ ID NO 56301

SEQ ID NO: 112403 - protein, 198 aa, Arabidopsis thaliana; identical to SEQ ID NO: 101164
  peptide (1)..(198): Ceres Seq. ID no. 13607163

SEQ ID NO: 112404 - protein, 154 aa, Arabidopsis thaliana; identical to SEQ ID NO: 101165
  peptide (1)..(154): Ceres Seq. ID no. 13607164

SEQ ID NO: 112405 - protein, 137 aa, Arabidopsis thaliana; identical to SEQ ID NO: 101166
  peptide (1)..(137): Ceres Seq. ID no. 13607165

SEQ ID NO: 112406 - DNA, 1585 bp, Arabidopsis thaliana; identical to SEQ ID NO: 101167
  misc_feature (1)..(1585): Ceres Seq. ID no. 13607170
  misc_feature (1)..(1585): Ortholog of  Ceres SEQ ID NO 14314449 as cited in SEQ ID NO 52409
  misc_feature (1)..(1585): Ortholog of  Ceres SEQ ID NO 15177818 as cited in SEQ ID NO 59762

SEQ ID NO: 112407 - protein, 256 aa, Arabidopsis thaliana; identical to SEQ ID NO: 101168
  peptide (1)..(256): Ceres Seq. ID no. 13607171

SEQ ID NO: 112408 - protein, 235 aa, Arabidopsis thaliana; identical to SEQ ID NO: 101169
  peptide (1)..(235): Ceres Seq. ID no. 13607172

SEQ ID NO: 112409 - protein, 198 aa, Arabidopsis thaliana; identical to SEQ ID NO: 101170
  peptide (1)..(198): Ceres Seq. ID no. 13607173

SEQ ID NO: 112410 - DNA, 742 bp, Arabidopsis thaliana; identical to SEQ ID NO: 101171
  misc_feature (1)..(742): Ceres Seq. ID no. 13607200
  misc_feature (1)..(742): Ortholog of  Ceres SEQ ID NO 13583509 as cited in SEQ ID NO 62253

SEQ ID NO: 112411 - protein, 177 aa, Arabidopsis thaliana; identical to SEQ ID NO: 101172
  peptide (1)..(177): Ceres Seq. ID no. 13607201

SEQ ID NO: 112412 - protein, 166 aa, Arabidopsis thaliana; identical to SEQ ID NO: 101173
  peptide (1)..(166): Ceres Seq. ID no. 13607202

SEQ ID NO: 112413 - DNA, 1656 bp, Arabidopsis thaliana; identical to SEQ ID NO: 101174
  misc_feature (1)..(1656): Ceres Seq. ID no. 13607207
  misc_feature (1)..(1656): Ortholog of  Ceres SEQ ID NO 13502874 as cited in SEQ ID NO 66298
  misc_feature (1)..(1656): Ortholog of  Ceres SEQ ID NO 12614124 as cited in SEQ ID NO 68392

SEQ ID NO: 112414 - protein, 521 aa, Arabidopsis thaliana; identical to SEQ ID NO: 101175
  peptide (1)..(521): Ceres Seq. ID no. 13607208

SEQ ID NO: 112415 - protein, 418 aa, Arabidopsis thaliana; identical to SEQ ID NO: 101176
  peptide (1)..(418): Ceres Seq. ID no. 13607209

SEQ ID NO: 112416 - protein, 347 aa, Arabidopsis thaliana; identical to SEQ ID NO: 101177
  peptide (1)..(347): Ceres Seq. ID no. 13607210

SEQ ID NO: 112417 - DNA, 1067 bp, Arabidopsis thaliana; identical to SEQ ID NO: 101178
  misc_feature (1)..(1067): Ceres Seq. ID no. 13607215
  misc_feature (1)..(1067): Ortholog of  Ceres SEQ ID NO 15172974 as cited in SEQ ID NO 67643

SEQ ID NO: 112418 - protein, 198 aa, Arabidopsis thaliana; identical to SEQ ID NO: 101179
  peptide (1)..(198): Ceres Seq. ID no. 13607216

SEQ ID NO: 112419 - DNA, 973 bp, Arabidopsis thaliana; identical to SEQ ID NO: 101180
  misc_feature (1)..(973): Ceres Seq. ID no. 13607217
  misc_feature (1)..(973): Ortholog of  Ceres SEQ ID NO 13656486 as cited in SEQ ID NO 69202

SEQ ID NO: 112420 - protein, 286 aa, Arabidopsis thaliana; identical to SEQ ID NO: 101181
  peptide (1)..(286): Ceres Seq. ID no. 13607218

SEQ ID NO: 112421 - protein, 272 aa, Arabidopsis thaliana; identical to SEQ ID NO: 101182
  peptide (1)..(272): Ceres Seq. ID no. 13607219

SEQ ID NO: 112422 - protein, 173 aa, Arabidopsis thaliana; identical to SEQ ID NO: 101183
  peptide (1)..(173): Ceres Seq. ID no. 13607220

SEQ ID NO: 112423 - DNA, 1120 bp, Arabidopsis thaliana; identical to SEQ ID NO: 101184
  misc_feature (1)..(1120): Ceres Seq. ID no. 13607221
  misc_feature (1)..(1120): Ortholog of  Ceres SEQ ID NO 14308107 as cited in SEQ ID NO 59030
  misc_feature (1)..(1120): Ortholog of  Ceres SEQ ID NO 15226612 as cited in SEQ ID NO 62700

SEQ ID NO: 112424 - protein, 350 aa, Arabidopsis thaliana; identical to SEQ ID NO: 101185
  peptide (1)..(350): Ceres Seq. ID no. 13607222

SEQ ID NO: 112425 - protein, 344 aa, Arabidopsis thaliana; identical to SEQ ID NO: 101186
  peptide (1)..(344): Ceres Seq. ID no. 13607223

SEQ ID NO: 112426 - protein, 237 aa, Arabidopsis thaliana; identical to SEQ ID NO: 73797
  peptide (1)..(237): Ceres Seq. ID no. 13607224

SEQ ID NO: 112427 - DNA, 1292 bp, Arabidopsis thaliana; identical to SEQ ID NO: 101188
  misc_feature (1)..(1292): Ceres Seq. ID no. 13607237
  misc_feature (1)..(1292): Ortholog of  Ceres SEQ ID NO 12364737 as cited in SEQ ID NO 51089
  misc_feature (1)..(1292): Ortholog of  Ceres SEQ ID NO 14306553 as cited in SEQ ID NO 53121
  misc_feature (1)..(1292): Ortholog of  Ceres SEQ ID NO 13595567 as cited in SEQ ID NO 56760
  misc_feature (1)..(1292): Ortholog of  Ceres SEQ ID NO 13655302 as cited in SEQ ID NO 63307
  misc_feature (1)..(1292): Ortholog of  Ceres SEQ ID NO 13597389 as cited in SEQ ID NO 63426
  misc_feature (1)..(1292): Ortholog of  Ceres SEQ ID NO 13597380 as cited in SEQ ID NO 64054
  misc_feature (1)..(1292): Ortholog of  Ceres SEQ ID NO 12625474 as cited in SEQ ID NO 64169
  misc_feature (1)..(1292): Ortholog of  Ceres SEQ ID NO 13597502 as cited in SEQ ID NO 64681
  misc_feature (1)..(1292): Ortholog of  Ceres SEQ ID NO 15180805 as cited in SEQ ID NO 0

SEQ ID NO: 112428 - protein, 385 aa, Arabidopsis thaliana; identical to SEQ ID NO: 101189
  peptide (1)..(385): Ceres Seq. ID no. 13607238

SEQ ID NO: 112429 - protein, 374 aa, Arabidopsis thaliana; identical to SEQ ID NO: 101190
  peptide (1)..(374): Ceres Seq. ID no. 13607239

SEQ ID NO: 112430 - protein, 238 aa, Arabidopsis thaliana; identical to SEQ ID NO: 101191
  peptide (1)..(238): Ceres Seq. ID no. 13607240

SEQ ID NO: 112431 - DNA, 2016 bp, Arabidopsis thaliana; identical to SEQ ID NO: 101192
  misc_feature (1)..(2016): Ceres Seq. ID no. 13607246
  misc_feature (1)..(2016): Ortholog of  Ceres SEQ ID NO 14303109 as cited in SEQ ID NO 66330

SEQ ID NO: 112432 - protein, 520 aa, Arabidopsis thaliana; identical to SEQ ID NO: 101193
  peptide (1)..(520): Ceres Seq. ID no. 13607247

SEQ ID NO: 112433 - protein, 334 aa, Arabidopsis thaliana; identical to SEQ ID NO: 101194
  peptide (1)..(334): Ceres Seq. ID no. 13607248

SEQ ID NO: 112434 - protein, 329 aa, Arabidopsis thaliana; identical to SEQ ID NO: 101195
  peptide (1)..(329): Ceres Seq. ID no. 13607249

SEQ ID NO: 112435 - DNA, 1266 bp, Arabidopsis thaliana; identical to SEQ ID NO: 101196
  misc_feature (1)..(1266): Ceres Seq. ID no. 13607258
  misc_feature (1)..(1266): Ortholog of  Ceres SEQ ID NO 15168521 as cited in SEQ ID NO 58180

SEQ ID NO: 112436 - protein, 307 aa, Arabidopsis thaliana; identical to SEQ ID NO: 101197
  peptide (1)..(307): Ceres Seq. ID no. 13607259

SEQ ID NO: 112437 - protein, 264 aa, Arabidopsis thaliana; identical to SEQ ID NO: 76238
  peptide (1)..(264): Ceres Seq. ID no. 13607260

SEQ ID NO: 112438 - DNA, 2686 bp, Arabidopsis thaliana; identical to SEQ ID NO: 101199
  misc_feature (1)..(2686): Ceres Seq. ID no. 13607269
  misc_feature (1)..(2686): Ortholog of  Ceres SEQ ID NO 13659971 as cited in SEQ ID NO 67565
  misc_feature (1)..(2686): Ortholog of  Ceres SEQ ID NO 13500385 as cited in SEQ ID NO 67583

SEQ ID NO: 112439 - protein, 544 aa, Arabidopsis thaliana; identical to SEQ ID NO: 101200
  peptide (1)..(544): Ceres Seq. ID no. 13607270

SEQ ID NO: 112440 - protein, 520 aa, Arabidopsis thaliana; identical to SEQ ID NO: 101201
  peptide (1)..(520): Ceres Seq. ID no. 13607271

SEQ ID NO: 112441 - protein, 436 aa, Arabidopsis thaliana; identical to SEQ ID NO: 101202
  peptide (1)..(436): Ceres Seq. ID no. 13607272

SEQ ID NO: 112442 - DNA, 2304 bp, Arabidopsis thaliana; identical to SEQ ID NO: 101203
  misc_feature (1)..(2304): Ceres Seq. ID no. 13607273
  misc_feature (1)..(2304): Ortholog of  Ceres SEQ ID NO 13655640 as cited in SEQ ID NO 63844

SEQ ID NO: 112443 - protein, 699 aa, Arabidopsis thaliana; identical to SEQ ID NO: 101204
  peptide (1)..(699): Ceres Seq. ID no. 13607274

SEQ ID NO: 112444 - protein, 686 aa, Arabidopsis thaliana; identical to SEQ ID NO: 101205
  peptide (1)..(686): Ceres Seq. ID no. 13607275

SEQ ID NO: 112445 - protein, 599 aa, Arabidopsis thaliana; identical to SEQ ID NO: 101206
  peptide (1)..(599): Ceres Seq. ID no. 13607276

SEQ ID NO: 112446 - DNA, 1726 bp, Arabidopsis thaliana; identical to SEQ ID NO: 101207
  misc_feature (1)..(1726): Ceres Seq. ID no. 13607277
  misc_feature (1)..(1726): Ortholog of  Ceres SEQ ID NO 13594209 as cited in SEQ ID NO 59089
  misc_feature (1)..(1726): Ortholog of  Ceres SEQ ID NO 15176783 as cited in SEQ ID NO 65590
  misc_feature (1)..(1726): Ortholog of  Ceres SEQ ID NO 14308019 as cited in SEQ ID NO 65849
  misc_feature (1)..(1726): Ortholog of  Ceres SEQ ID NO 15170167 as cited in SEQ ID NO 66224
  misc_feature (1)..(1726): Ortholog of  Ceres SEQ ID NO 13502874 as cited in SEQ ID NO 66298
  misc_feature (1)..(1726): Ortholog of  Ceres SEQ ID NO 14307944 as cited in SEQ ID NO 66503
  misc_feature (1)..(1726): Ortholog of  Ceres SEQ ID NO 12614124 as cited in SEQ ID NO 68392
  misc_feature (1)..(1726): Ortholog of  Ceres SEQ ID NO 14307980 as cited in SEQ ID NO 69214

SEQ ID NO: 112447 - protein, 516 aa, Arabidopsis thaliana; identical to SEQ ID NO: 101208
  peptide (1)..(516): Ceres Seq. ID no. 13607278

SEQ ID NO: 112448 - protein, 328 aa, Arabidopsis thaliana; identical to SEQ ID NO: 101209
  peptide (1)..(328): Ceres Seq. ID no. 13607279

SEQ ID NO: 112449 - protein, 327 aa, Arabidopsis thaliana; identical to SEQ ID NO: 101210
  peptide (1)..(327): Ceres Seq. ID no. 13607280

SEQ ID NO: 112450 - DNA, 1058 bp, Arabidopsis thaliana; identical to SEQ ID NO: 101211
  misc_feature (1)..(1058): Ceres Seq. ID no. 13607285
  misc_feature (1)..(1058): Ortholog of  Ceres SEQ ID NO 12617080 as cited in SEQ ID NO 63943
  misc_feature (1)..(1058): Ortholog of  Ceres SEQ ID NO 13657621 as cited in SEQ ID NO 65802

SEQ ID NO: 112451 - protein, 268 aa, Arabidopsis thaliana; identical to SEQ ID NO: 101212
  peptide (1)..(268): Ceres Seq. ID no. 13607286

SEQ ID NO: 112452 - protein, 188 aa, Arabidopsis thaliana; identical to SEQ ID NO: 101213
  peptide (1)..(188): Ceres Seq. ID no. 13607287

SEQ ID NO: 112453 - protein, 142 aa, Arabidopsis thaliana; identical to SEQ ID NO: 101214
  peptide (1)..(142): Ceres Seq. ID no. 13607288

SEQ ID NO: 112454 - DNA, 1997 bp, Arabidopsis thaliana; identical to SEQ ID NO: 101215
  misc_feature (1)..(1997): Ceres Seq. ID no. 13607292
  misc_feature (1)..(1997): Ortholog of  Ceres SEQ ID NO 13648124 as cited in SEQ ID NO 20362

SEQ ID NO: 112455 - protein, 517 aa, Arabidopsis thaliana; identical to SEQ ID NO: 101216
  peptide (1)..(517): Ceres Seq. ID no. 13607293

SEQ ID NO: 112456 - protein, 488 aa, Arabidopsis thaliana; identical to SEQ ID NO: 101217
  peptide (1)..(488): Ceres Seq. ID no. 13607294

SEQ ID NO: 112457 - protein, 310 aa, Arabidopsis thaliana; identical to SEQ ID NO: 101218
  peptide (1)..(310): Ceres Seq. ID no. 13607295

SEQ ID NO: 112458 - DNA, 921 bp, Arabidopsis thaliana; identical to SEQ ID NO: 101219
  misc_feature (1)..(921): Ceres Seq. ID no. 13607303
  misc_feature (1)..(921): Ortholog of  Ceres SEQ ID NO 13658584 as cited in SEQ ID NO 66428
  misc_feature (1)..(921): Ortholog of  Ceres SEQ ID NO 13596269 as cited in SEQ ID NO 67972

SEQ ID NO: 112459 - protein, 113 aa, Arabidopsis thaliana; identical to SEQ ID NO: 74812
  peptide (1)..(113): Ceres Seq. ID no. 13607304

SEQ ID NO: 112460 - DNA, 1205 bp, Arabidopsis thaliana; identical to SEQ ID NO: 101221
  misc_feature (1)..(1205): Ceres Seq. ID no. 13607309
  misc_feature (1)..(1205): Ortholog of  Ceres SEQ ID NO 14308107 as cited in SEQ ID NO 59030
  misc_feature (1)..(1205): Ortholog of  Ceres SEQ ID NO 15226612 as cited in SEQ ID NO 62700

SEQ ID NO: 112461 - protein, 362 aa, Arabidopsis thaliana; identical to SEQ ID NO: 30693
  peptide (1)..(362): Ceres Seq. ID no. 13607310

SEQ ID NO: 112462 - protein, 350 aa, Arabidopsis thaliana; identical to SEQ ID NO: 30694
  peptide (1)..(350): Ceres Seq. ID no. 13607311

SEQ ID NO: 112463 - protein, 309 aa, Arabidopsis thaliana; identical to SEQ ID NO: 30695
  peptide (1)..(309): Ceres Seq. ID no. 13607312

SEQ ID NO: 112464 - DNA, 720 bp, Arabidopsis thaliana; identical to SEQ ID NO: 101225
  misc_feature (1)..(720): Ceres Seq. ID no. 13607313
  misc_feature (1)..(720): Ortholog of  Ceres SEQ ID NO 13594023 as cited in SEQ ID NO 55192
  misc_feature (1)..(720): Ortholog of  Ceres SEQ ID NO 15174297 as cited in SEQ ID NO 0

SEQ ID NO: 112465 - protein, 167 aa, Arabidopsis thaliana; identical to SEQ ID NO: 101226
  peptide (1)..(167): Ceres Seq. ID no. 13607314

SEQ ID NO: 112466 - protein, 116 aa, Arabidopsis thaliana; identical to SEQ ID NO: 101227
  peptide (1)..(116): Ceres Seq. ID no. 13607315

SEQ ID NO: 112467 - protein, 109 aa, Arabidopsis thaliana; identical to SEQ ID NO: 101228
  peptide (1)..(109): Ceres Seq. ID no. 13607316

SEQ ID NO: 112468 - DNA, 1256 bp, Arabidopsis thaliana; identical to SEQ ID NO: 101229
  misc_feature (1)..(1256): Ceres Seq. ID no. 13607317
  misc_feature (1)..(1256): Ortholog of  Ceres SEQ ID NO 14304716 as cited in SEQ ID NO 53189
  misc_feature (1)..(1256): Ortholog of  Ceres SEQ ID NO 14304898 as cited in SEQ ID NO 53598

SEQ ID NO: 112469 - protein, 328 aa, Arabidopsis thaliana; identical to SEQ ID NO: 101230
  peptide (1)..(328): Ceres Seq. ID no. 13607318

SEQ ID NO: 112470 - protein, 304 aa, Arabidopsis thaliana; identical to SEQ ID NO: 79720
  peptide (1)..(304): Ceres Seq. ID no. 13607319

SEQ ID NO: 112471 - protein, 272 aa, Arabidopsis thaliana; identical to SEQ ID NO: 79721
  peptide (1)..(272): Ceres Seq. ID no. 13607320

SEQ ID NO: 112472 - DNA, 856 bp, Arabidopsis thaliana; identical to SEQ ID NO: 101233
  misc_feature (1)..(856): Ceres Seq. ID no. 13607335
  misc_feature (1)..(856): Ortholog of  Ceres SEQ ID NO 13599311 as cited in SEQ ID NO 0

SEQ ID NO: 112473 - protein, 216 aa, Arabidopsis thaliana; identical to SEQ ID NO: 28511
  peptide (1)..(216): Ceres Seq. ID no. 13607336

SEQ ID NO: 112474 - protein, 202 aa, Arabidopsis thaliana; identical to SEQ ID NO: 28512
  peptide (1)..(202): Ceres Seq. ID no. 13607337

SEQ ID NO: 112475 - protein, 200 aa, Arabidopsis thaliana; identical to SEQ ID NO: 28513
  peptide (1)..(200): Ceres Seq. ID no. 13607338

SEQ ID NO: 112476 - DNA, 735 bp, Arabidopsis thaliana; identical to SEQ ID NO: 101237
  misc_feature (1)..(735): Ceres Seq. ID no. 13607339
  misc_feature (1)..(735): Ortholog of  Ceres SEQ ID NO 15176321 as cited in SEQ ID NO 52814
  misc_feature (1)..(735): Ortholog of  Ceres SEQ ID NO 12563124 as cited in SEQ ID NO 57104
  misc_feature (1)..(735): Ortholog of  Ceres SEQ ID NO 13598373 as cited in SEQ ID NO 62185
  misc_feature (1)..(735): Ortholog of  Ceres SEQ ID NO 12584664 as cited in SEQ ID NO 62232
  misc_feature (1)..(735): Ortholog of  Ceres SEQ ID NO 12617639 as cited in SEQ ID NO 65219

SEQ ID NO: 112477 - protein, 176 aa, Arabidopsis thaliana; identical to SEQ ID NO: 76877
  peptide (1)..(176): Ceres Seq. ID no. 13607340

SEQ ID NO: 112478 - protein, 115 aa, Arabidopsis thaliana; identical to SEQ ID NO: 76878
  peptide (1)..(115): Ceres Seq. ID no. 13607341

SEQ ID NO: 112479 - protein, 108 aa, Arabidopsis thaliana; identical to SEQ ID NO: 76879
  peptide (1)..(108): Ceres Seq. ID no. 13607342

SEQ ID NO: 112480 - DNA, 930 bp, Arabidopsis thaliana; identical to SEQ ID NO: 101241
  misc_feature (1)..(930): Ceres Seq. ID no. 13607346
  misc_feature (1)..(930): Ortholog of  Ceres SEQ ID NO 13586122 as cited in SEQ ID NO 0

SEQ ID NO: 112481 - protein, 121 aa, Arabidopsis thaliana; identical to SEQ ID NO: 101242
  peptide (1)..(121): Ceres Seq. ID no. 13607347

SEQ ID NO: 112482 - protein, 103 aa, Arabidopsis thaliana; identical to SEQ ID NO: 101243
  peptide (1)..(103): Ceres Seq. ID no. 13607348

SEQ ID NO: 112483 - DNA, 1688 bp, Arabidopsis thaliana; identical to SEQ ID NO: 101244
  misc_feature (1)..(1688): Ceres Seq. ID no. 13607362
  misc_feature (1)..(1688): Ortholog of  Ceres SEQ ID NO 13596816 as cited in SEQ ID NO 62287

SEQ ID NO: 112484 - protein, 498 aa, Arabidopsis thaliana; identical to SEQ ID NO: 101245
  peptide (1)..(498): Ceres Seq. ID no. 13607363

SEQ ID NO: 112485 - protein, 472 aa, Arabidopsis thaliana; identical to SEQ ID NO: 101246
  peptide (1)..(472): Ceres Seq. ID no. 13607364

SEQ ID NO: 112486 - protein, 339 aa, Arabidopsis thaliana; identical to SEQ ID NO: 101247
  peptide (1)..(339): Ceres Seq. ID no. 13607365

SEQ ID NO: 112487 - DNA, 1597 bp, Arabidopsis thaliana; identical to SEQ ID NO: 101248
  misc_feature (1)..(1597): Ceres Seq. ID no. 13607368
  misc_feature (1)..(1597): Ortholog of  Ceres SEQ ID NO 15225627 as cited in SEQ ID NO 64323

SEQ ID NO: 112488 - protein, 390 aa, Arabidopsis thaliana; identical to SEQ ID NO: 101249
  peptide (1)..(390): Ceres Seq. ID no. 13607369

SEQ ID NO: 112489 - protein, 373 aa, Arabidopsis thaliana; identical to SEQ ID NO: 23380
  peptide (1)..(373): Ceres Seq. ID no. 13607370

SEQ ID NO: 112490 - protein, 315 aa, Arabidopsis thaliana; identical to SEQ ID NO: 101251
  peptide (1)..(315): Ceres Seq. ID no. 13607371

SEQ ID NO: 112491 - DNA, 1233 bp, Arabidopsis thaliana; identical to SEQ ID NO: 101252
  misc_feature (1)..(1233): Ceres Seq. ID no. 13607372
  misc_feature (1)..(1233): Ortholog of  Ceres SEQ ID NO 15226408 as cited in SEQ ID NO 55563

SEQ ID NO: 112492 - protein, 367 aa, Arabidopsis thaliana; identical to SEQ ID NO: 36679
  peptide (1)..(367): Ceres Seq. ID no. 13607373

SEQ ID NO: 112493 - protein, 355 aa, Arabidopsis thaliana; identical to SEQ ID NO: 36680
  peptide (1)..(355): Ceres Seq. ID no. 13607374

SEQ ID NO: 112494 - protein, 344 aa, Arabidopsis thaliana; identical to SEQ ID NO: 36681
  peptide (1)..(344): Ceres Seq. ID no. 13607375

SEQ ID NO: 112495 - DNA, 735 bp, Arabidopsis thaliana; identical to SEQ ID NO: 101256
  misc_feature (1)..(735): Ceres Seq. ID no. 13607387
  misc_feature (1)..(735): Ortholog of  Ceres SEQ ID NO 15178291 as cited in SEQ ID NO 0

SEQ ID NO: 112496 - protein, 175 aa, Arabidopsis thaliana; identical to SEQ ID NO: 101257
  peptide (1)..(175): Ceres Seq. ID no. 13607388

SEQ ID NO: 112497 - protein, 113 aa, Arabidopsis thaliana; identical to SEQ ID NO: 21390
  peptide (1)..(113): Ceres Seq. ID no. 13607389

SEQ ID NO: 112498 - protein, 92 aa, Arabidopsis thaliana; identical to SEQ ID NO: 101259
  peptide (1)..(92): Ceres Seq. ID no. 13607390

SEQ ID NO: 112499 - DNA, 1390 bp, Arabidopsis thaliana; identical to SEQ ID NO: 101260
  misc_feature (1)..(1390): Ceres Seq. ID no. 13607397
  misc_feature (1)..(1390): Ortholog of  Ceres SEQ ID NO 13495628 as cited in SEQ ID NO 60727

SEQ ID NO: 112500 - protein, 381 aa, Arabidopsis thaliana; identical to SEQ ID NO: 21325
  peptide (1)..(381): Ceres Seq. ID no. 13607398

SEQ ID NO: 112501 - protein, 372 aa, Arabidopsis thaliana; identical to SEQ ID NO: 21326
  peptide (1)..(372): Ceres Seq. ID no. 13607399

SEQ ID NO: 112502 - protein, 275 aa, Arabidopsis thaliana; identical to SEQ ID NO: 21327
  peptide (1)..(275): Ceres Seq. ID no. 13607400

SEQ ID NO: 112503 - DNA, 859 bp, Arabidopsis thaliana; identical to SEQ ID NO: 101264
  misc_feature (1)..(859): Ceres Seq. ID no. 13607405
  misc_feature (1)..(859): Ortholog of  Ceres SEQ ID NO 14302000 as cited in SEQ ID NO 52175
  misc_feature (1)..(859): Ortholog of  Ceres SEQ ID NO 14316371 as cited in SEQ ID NO 60113

SEQ ID NO: 112504 - protein, 230 aa, Arabidopsis thaliana; identical to SEQ ID NO: 101265
  peptide (1)..(230): Ceres Seq. ID no. 13607406

SEQ ID NO: 112505 - protein, 203 aa, Arabidopsis thaliana; identical to SEQ ID NO: 26528
  peptide (1)..(203): Ceres Seq. ID no. 13607407

SEQ ID NO: 112506 - protein, 134 aa, Arabidopsis thaliana; identical to SEQ ID NO: 26529
  peptide (1)..(134): Ceres Seq. ID no. 13607408

SEQ ID NO: 112507 - DNA, 944 bp, Arabidopsis thaliana; identical to SEQ ID NO: 101268
  misc_feature (1)..(944): Ceres Seq. ID no. 13607416
  misc_feature (1)..(944): Ortholog of  Ceres SEQ ID NO 13582619 as cited in SEQ ID NO 56520
  misc_feature (1)..(944): Ortholog of  Ceres SEQ ID NO 13660872 as cited in SEQ ID NO 60830
  misc_feature (1)..(944): Ortholog of  Ceres SEQ ID NO 12616221 as cited in SEQ ID NO 63291

SEQ ID NO: 112508 - protein, 279 aa, Arabidopsis thaliana; identical to SEQ ID NO: 101269
  peptide (1)..(279): Ceres Seq. ID no. 13607417

SEQ ID NO: 112509 - protein, 267 aa, Arabidopsis thaliana; identical to SEQ ID NO: 101270
  peptide (1)..(267): Ceres Seq. ID no. 13607418

SEQ ID NO: 112510 - protein, 243 aa, Arabidopsis thaliana; identical to SEQ ID NO: 101271
  peptide (1)..(243): Ceres Seq. ID no. 13607419

SEQ ID NO: 112511 - DNA, 1317 bp, Arabidopsis thaliana; identical to SEQ ID NO: 101272
  misc_feature (1)..(1317): Ceres Seq. ID no. 13607426
  misc_feature (1)..(1317): Ortholog of  Ceres SEQ ID NO 13596039 as cited in SEQ ID NO 62117

SEQ ID NO: 112512 - protein, 410 aa, Arabidopsis thaliana; identical to SEQ ID NO: 100816
  peptide (1)..(410): Ceres Seq. ID no. 13607427

SEQ ID NO: 112513 - protein, 388 aa, Arabidopsis thaliana; identical to SEQ ID NO: 100817
  peptide (1)..(388): Ceres Seq. ID no. 13607428

SEQ ID NO: 112514 - protein, 312 aa, Arabidopsis thaliana; identical to SEQ ID NO: 100818
  peptide (1)..(312): Ceres Seq. ID no. 13607429

SEQ ID NO: 112515 - DNA, 2984 bp, Arabidopsis thaliana; identical to SEQ ID NO: 101276
  misc_feature (1)..(2984): Ceres Seq. ID no. 13607434
  misc_feature (1)..(2984): Ortholog of  Ceres SEQ ID NO 15170666 as cited in SEQ ID NO 63386

SEQ ID NO: 112516 - protein, 814 aa, Arabidopsis thaliana; identical to SEQ ID NO: 101277
  peptide (1)..(814): Ceres Seq. ID no. 13607435

SEQ ID NO: 112517 - protein, 798 aa, Arabidopsis thaliana; identical to SEQ ID NO: 101278
  peptide (1)..(798): Ceres Seq. ID no. 13607436

SEQ ID NO: 112518 - protein, 652 aa, Arabidopsis thaliana; identical to SEQ ID NO: 101279
  peptide (1)..(652): Ceres Seq. ID no. 13607437

SEQ ID NO: 112519 - DNA, 626 bp, Arabidopsis thaliana; identical to SEQ ID NO: 101280
  misc_feature (1)..(626): Ceres Seq. ID no. 13607450
  misc_feature (1)..(626): Ortholog of  Ceres SEQ ID NO 14310057 as cited in SEQ ID NO 225
  misc_feature (1)..(626): Ortholog of  Ceres SEQ ID NO 15225572 as cited in SEQ ID NO 61651

SEQ ID NO: 112520 - protein, 169 aa, Arabidopsis thaliana; identical to SEQ ID NO: 101281
  peptide (1)..(169): Ceres Seq. ID no. 13607451

SEQ ID NO: 112521 - protein, 149 aa, Arabidopsis thaliana; identical to SEQ ID NO: 21514
  peptide (1)..(149): Ceres Seq. ID no. 13607452

SEQ ID NO: 112522 - protein, 143 aa, Arabidopsis thaliana; identical to SEQ ID NO: 21515
  peptide (1)..(143): Ceres Seq. ID no. 13607453

SEQ ID NO: 112523 - DNA, 1265 bp, Arabidopsis thaliana; identical to SEQ ID NO: 101284
  misc_feature (1)..(1265): Ceres Seq. ID no. 13607454
  misc_feature (1)..(1265): Ortholog of  Ceres SEQ ID NO 13596891 as cited in SEQ ID NO 62868
  misc_feature (1)..(1265): Ortholog of  Ceres SEQ ID NO 12617235 as cited in SEQ ID NO 63990
  misc_feature (1)..(1265): Ortholog of  Ceres SEQ ID NO 13655371 as cited in SEQ ID NO 68945

SEQ ID NO: 112524 - protein, 346 aa, Arabidopsis thaliana; identical to SEQ ID NO: 21097
  peptide (1)..(346): Ceres Seq. ID no. 13607455

SEQ ID NO: 112525 - protein, 321 aa, Arabidopsis thaliana; identical to SEQ ID NO: 21098
  peptide (1)..(321): Ceres Seq. ID no. 13607456

SEQ ID NO: 112526 - protein, 301 aa, Arabidopsis thaliana; identical to SEQ ID NO: 21099
  peptide (1)..(301): Ceres Seq. ID no. 13607457

SEQ ID NO: 112527 - DNA, 653 bp, Arabidopsis thaliana; identical to SEQ ID NO: 101288
  misc_feature (1)..(653): Ceres Seq. ID no. 13607482
  misc_feature (1)..(653): Ortholog of  Ceres SEQ ID NO 13594922 as cited in SEQ ID NO 55751

SEQ ID NO: 112528 - protein, 136 aa, Arabidopsis thaliana; identical to SEQ ID NO: 101289
  peptide (1)..(136): Ceres Seq. ID no. 13607483

SEQ ID NO: 112529 - protein, 121 aa, Arabidopsis thaliana; identical to SEQ ID NO: 101290
  peptide (1)..(121): Ceres Seq. ID no. 13607484

SEQ ID NO: 112530 - protein, 102 aa, Arabidopsis thaliana; identical to SEQ ID NO: 101291
  peptide (1)..(102): Ceres Seq. ID no. 13607485

SEQ ID NO: 112531 - DNA, 1209 bp, Arabidopsis thaliana; identical to SEQ ID NO: 101292
  misc_feature (1)..(1209): Ceres Seq. ID no. 13607494
  misc_feature (1)..(1209): Ortholog of  Ceres SEQ ID NO 15177991 as cited in SEQ ID NO 53915
  misc_feature (1)..(1209): Ortholog of  Ceres SEQ ID NO 15174347 as cited in SEQ ID NO 58577
  misc_feature (1)..(1209): Ortholog of  Ceres SEQ ID NO 13596609 as cited in SEQ ID NO 63070
  misc_feature (1)..(1209): Ortholog of  Ceres SEQ ID NO 12616895 as cited in SEQ ID NO 63909
  misc_feature (1)..(1209): Ortholog of  Ceres SEQ ID NO 13598574 as cited in SEQ ID NO 69083

SEQ ID NO: 112532 - protein, 263 aa, Arabidopsis thaliana; identical to SEQ ID NO: 25093
  peptide (1)..(263): Ceres Seq. ID no. 13607495

SEQ ID NO: 112533 - protein, 218 aa, Arabidopsis thaliana; identical to SEQ ID NO: 25094
  peptide (1)..(218): Ceres Seq. ID no. 13607496

SEQ ID NO: 112534 - protein, 210 aa, Arabidopsis thaliana; identical to SEQ ID NO: 25095
  peptide (1)..(210): Ceres Seq. ID no. 13607497

SEQ ID NO: 112535 - DNA, 769 bp, Arabidopsis thaliana; identical to SEQ ID NO: 101296
  misc_feature (1)..(769): Ceres Seq. ID no. 13607498
  misc_feature (1)..(769): Ortholog of  Ceres SEQ ID NO 15225138 as cited in SEQ ID NO 65710
  misc_feature (1)..(769): Ortholog of  Ceres SEQ ID NO 15176713 as cited in SEQ ID NO 0

SEQ ID NO: 112536 - protein, 183 aa, Arabidopsis thaliana; identical to SEQ ID NO: 26298
  peptide (1)..(183): Ceres Seq. ID no. 13607499

SEQ ID NO: 112537 - protein, 123 aa, Arabidopsis thaliana; identical to SEQ ID NO: 26299
  peptide (1)..(123): Ceres Seq. ID no. 13607500

SEQ ID NO: 112538 - protein, 116 aa, Arabidopsis thaliana; identical to SEQ ID NO: 26300
  peptide (1)..(116): Ceres Seq. ID no. 13607501

SEQ ID NO: 112539 - DNA, 1158 bp, Arabidopsis thaliana; identical to SEQ ID NO: 101300
  misc_feature (1)..(1158): Ceres Seq. ID no. 13607502
  misc_feature (1)..(1158): Ortholog of  Ceres SEQ ID NO 13599444 as cited in SEQ ID NO 517
  misc_feature (1)..(1158): Ortholog of  Ceres SEQ ID NO 15169431 as cited in SEQ ID NO 60449
  misc_feature (1)..(1158): Ortholog of  Ceres SEQ ID NO 12615444 as cited in SEQ ID NO 62593
  misc_feature (1)..(1158): Ortholog of  Ceres SEQ ID NO 14302204 as cited in SEQ ID NO 63150

SEQ ID NO: 112540 - protein, 288 aa, Arabidopsis thaliana; identical to SEQ ID NO: 25453
  peptide (1)..(288): Ceres Seq. ID no. 13607503

SEQ ID NO: 112541 - protein, 242 aa, Arabidopsis thaliana; identical to SEQ ID NO: 25454
  peptide (1)..(242): Ceres Seq. ID no. 13607504

SEQ ID NO: 112542 - protein, 223 aa, Arabidopsis thaliana; identical to SEQ ID NO: 25455
  peptide (1)..(223): Ceres Seq. ID no. 13607505

SEQ ID NO: 112543 - DNA, 722 bp, Arabidopsis thaliana; identical to SEQ ID NO: 101304
  misc_feature (1)..(722): Ceres Seq. ID no. 13607506
  misc_feature (1)..(722): Ortholog of  Ceres SEQ ID NO 12557737 as cited in SEQ ID NO 81

SEQ ID NO: 112544 - protein, 146 aa, Arabidopsis thaliana [sequence omitted]

SEQ ID NO: 112545 - protein, 88 aa, Arabidopsis thaliana; identical to SEQ ID NO: 101306
  peptide (1)..(88): Ceres Seq. ID no. 13607508

SEQ ID NO: 112546 - protein, 79 aa, Arabidopsis thaliana; identical to SEQ ID NO: 21210
  peptide (1)..(79): Ceres Seq. ID no. 13607509

SEQ ID NO: 112547 - DNA, 1975 bp, Arabidopsis thaliana; identical to SEQ ID NO: 101308
  misc_feature (1)..(1975): Ceres Seq. ID no. 13607514
  misc_feature (1)..(1975): Ortholog of  Ceres SEQ ID NO 15178931 as cited in SEQ ID NO 1125
  misc_feature (1)..(1975): Ortholog of  Ceres SEQ ID NO 13596648 as cited in SEQ ID NO 63080
  misc_feature (1)..(1975): Ortholog of  Ceres SEQ ID NO 13584744 as cited in SEQ ID NO 69137

SEQ ID NO: 112548 - protein, 601 aa, Arabidopsis thaliana; identical to SEQ ID NO: 101309
  peptide (1)..(601): Ceres Seq. ID no. 13607515

SEQ ID NO: 112549 - protein, 484 aa, Arabidopsis thaliana; identical to SEQ ID NO: 91782
  peptide (1)..(484): Ceres Seq. ID no. 13607516

SEQ ID NO: 112550 - protein, 409 aa, Arabidopsis thaliana; identical to SEQ ID NO: 91783
  peptide (1)..(409): Ceres Seq. ID no. 13607517

SEQ ID NO: 112551 - DNA, 1855 bp, Arabidopsis thaliana; identical to SEQ ID NO: 101312
  misc_feature (1)..(1855): Ceres Seq. ID no. 13607547
  misc_feature (1)..(1855): Ortholog of  Ceres SEQ ID NO 15175923 as cited in SEQ ID NO 54037
  misc_feature (1)..(1855): Ortholog of  Ceres SEQ ID NO 14303366 as cited in SEQ ID NO 54418
  misc_feature (1)..(1855): Ortholog of  Ceres SEQ ID NO 13503610 as cited in SEQ ID NO 62416
  misc_feature (1)..(1855): Ortholog of  Ceres SEQ ID NO 13657610 as cited in SEQ ID NO 66165
  misc_feature (1)..(1855): Ortholog of  Ceres SEQ ID NO 13598312 as cited in SEQ ID NO 68448
  misc_feature (1)..(1855): Ortholog of  Ceres SEQ ID NO 13596100 as cited in SEQ ID NO 68573

SEQ ID NO: 112552 - protein, 512 aa, Arabidopsis thaliana; identical to SEQ ID NO: 101313
  peptide (1)..(512): Ceres Seq. ID no. 13607548

SEQ ID NO: 112553 - protein, 479 aa, Arabidopsis thaliana; identical to SEQ ID NO: 101314
  peptide (1)..(479): Ceres Seq. ID no. 13607549

SEQ ID NO: 112554 - protein, 456 aa, Arabidopsis thaliana; identical to SEQ ID NO: 101315
  peptide (1)..(456): Ceres Seq. ID no. 13607550

SEQ ID NO: 112555 - DNA, 979 bp, Arabidopsis thaliana; identical to SEQ ID NO: 101316
  misc_feature (1)..(979): Ceres Seq. ID no. 13607551
  misc_feature (1)..(979): Ortholog of  Ceres SEQ ID NO 13582619 as cited in SEQ ID NO 56520
  misc_feature (1)..(979): Ortholog of  Ceres SEQ ID NO 12611392 as cited in SEQ ID NO 56826
  misc_feature (1)..(979): Ortholog of  Ceres SEQ ID NO 13660872 as cited in SEQ ID NO 60830

SEQ ID NO: 112556 - protein, 276 aa, Arabidopsis thaliana; identical to SEQ ID NO: 101317
  peptide (1)..(276): Ceres Seq. ID no. 13607552

SEQ ID NO: 112557 - protein, 250 aa, Arabidopsis thaliana; identical to SEQ ID NO: 89514
  peptide (1)..(250): Ceres Seq. ID no. 13607553

SEQ ID NO: 112558 - protein, 148 aa, Arabidopsis thaliana; identical to SEQ ID NO: 89515
  peptide (1)..(148): Ceres Seq. ID no. 13607554

SEQ ID NO: 112559 - DNA, 1224 bp, Arabidopsis thaliana; identical to SEQ ID NO: 101320
  misc_feature (1)..(1224): Ceres Seq. ID no. 13607555
  misc_feature (1)..(1224): Ortholog of  Ceres SEQ ID NO 13596189 as cited in SEQ ID NO 68452

SEQ ID NO: 112560 - protein, 376 aa, Arabidopsis thaliana; identical to SEQ ID NO: 101321
  peptide (1)..(376): Ceres Seq. ID no. 13607556

SEQ ID NO: 112561 - protein, 370 aa, Arabidopsis thaliana; identical to SEQ ID NO: 26642
  peptide (1)..(370): Ceres Seq. ID no. 13607557

SEQ ID NO: 112562 - protein, 246 aa, Arabidopsis thaliana; identical to SEQ ID NO: 26643
  peptide (1)..(246): Ceres Seq. ID no. 13607558

SEQ ID NO: 112563 - DNA, 1444 bp, Arabidopsis thaliana; identical to SEQ ID NO: 101324
  misc_feature (1)..(1444): Ceres Seq. ID no. 13607559
  misc_feature (1)..(1444): Ortholog of  Ceres SEQ ID NO 14313264 as cited in SEQ ID NO 67300
  misc_feature (1)..(1444): Ortholog of  Ceres SEQ ID NO 14302824 as cited in SEQ ID NO 67794

SEQ ID NO: 112564 - protein, 367 aa, Arabidopsis thaliana; identical to SEQ ID NO: 26195
  peptide (1)..(367): Ceres Seq. ID no. 13607560

SEQ ID NO: 112565 - protein, 339 aa, Arabidopsis thaliana; identical to SEQ ID NO: 26196
  peptide (1)..(339): Ceres Seq. ID no. 13607561

SEQ ID NO: 112566 - protein, 308 aa, Arabidopsis thaliana; identical to SEQ ID NO: 26197
  peptide (1)..(308): Ceres Seq. ID no. 13607562

SEQ ID NO: 112567 - DNA, 2864 bp, Arabidopsis thaliana; identical to SEQ ID NO: 101328
  misc_feature (1)..(2864): Ceres Seq. ID no. 13607571
  misc_feature (1)..(2864): Ortholog of  Ceres SEQ ID NO 12586556 as cited in SEQ ID NO 64667
  misc_feature (1)..(2864): Ortholog of  Ceres SEQ ID NO 13660894 as cited in SEQ ID NO 67475

SEQ ID NO: 112568 - protein, 889 aa, Arabidopsis thaliana; identical to SEQ ID NO: 101329
  peptide (1)..(889): Ceres Seq. ID no. 13607572

SEQ ID NO: 112569 - protein, 817 aa, Arabidopsis thaliana; identical to SEQ ID NO: 101330
  peptide (1)..(817): Ceres Seq. ID no. 13607573

SEQ ID NO: 112570 - protein, 799 aa, Arabidopsis thaliana; identical to SEQ ID NO: 101331
  peptide (1)..(799): Ceres Seq. ID no. 13607574

SEQ ID NO: 112571 - DNA, 1111 bp, Arabidopsis thaliana; identical to SEQ ID NO: 101332
  misc_feature (1)..(1111): Ceres Seq. ID no. 13607590
  misc_feature (1)..(1111): Ortholog of  Ceres SEQ ID NO 13598735 as cited in SEQ ID NO 64586

SEQ ID NO: 112572 - protein, 323 aa, Arabidopsis thaliana; identical to SEQ ID NO: 43052
  peptide (1)..(323): Ceres Seq. ID no. 13607591

SEQ ID NO: 112573 - protein, 311 aa, Arabidopsis thaliana; identical to SEQ ID NO: 43053
  peptide (1)..(311): Ceres Seq. ID no. 13607592

SEQ ID NO: 112574 - protein, 310 aa, Arabidopsis thaliana; identical to SEQ ID NO: 43054
  peptide (1)..(310): Ceres Seq. ID no. 13607593

SEQ ID NO: 112575 - DNA, 1980 bp, Arabidopsis thaliana; identical to SEQ ID NO: 101336
  misc_feature (1)..(1980): Ceres Seq. ID no. 13607594
  misc_feature (1)..(1980): Ortholog of  Ceres SEQ ID NO 14314536 as cited in SEQ ID NO 52436

SEQ ID NO: 112576 - protein, 491 aa, Arabidopsis thaliana; identical to SEQ ID NO: 42719
  peptide (1)..(491): Ceres Seq. ID no. 13607595

SEQ ID NO: 112577 - protein, 490 aa, Arabidopsis thaliana; identical to SEQ ID NO: 42720
  peptide (1)..(490): Ceres Seq. ID no. 13607596

SEQ ID NO: 112578 - protein, 404 aa, Arabidopsis thaliana; identical to SEQ ID NO: 42721
  peptide (1)..(404): Ceres Seq. ID no. 13607597

SEQ ID NO: 112579 - DNA, 1081 bp, Arabidopsis thaliana; identical to SEQ ID NO: 101340
  misc_feature (1)..(1081): Ceres Seq. ID no. 13607602
  misc_feature (1)..(1081): Ortholog of  Ceres SEQ ID NO 12616162 as cited in SEQ ID NO 63260

SEQ ID NO: 112580 - protein, 278 aa, Arabidopsis thaliana; identical to SEQ ID NO: 101341
  peptide (1)..(278): Ceres Seq. ID no. 13607603

SEQ ID NO: 112581 - protein, 261 aa, Arabidopsis thaliana; identical to SEQ ID NO: 26263
  peptide (1)..(261): Ceres Seq. ID no. 13607604

SEQ ID NO: 112582 - protein, 187 aa, Arabidopsis thaliana; identical to SEQ ID NO: 26264
  peptide (1)..(187): Ceres Seq. ID no. 13607605

SEQ ID NO: 112583 - DNA, 1900 bp, Arabidopsis thaliana; identical to SEQ ID NO: 101344
  misc_feature (1)..(1900): Ceres Seq. ID no. 13607622
  misc_feature (1)..(1900): Ortholog of  Ceres SEQ ID NO 14307964 as cited in SEQ ID NO 66191
  misc_feature (1)..(1900): Ortholog of  Ceres SEQ ID NO 13502874 as cited in SEQ ID NO 66298
  misc_feature (1)..(1900): Ortholog of  Ceres SEQ ID NO 12614124 as cited in SEQ ID NO 68392

SEQ ID NO: 112584 - protein, 556 aa, Arabidopsis thaliana; identical to SEQ ID NO: 21313
  peptide (1)..(556): Ceres Seq. ID no. 13607623

SEQ ID NO: 112585 - protein, 534 aa, Arabidopsis thaliana; identical to SEQ ID NO: 21314
  peptide (1)..(534): Ceres Seq. ID no. 13607624

SEQ ID NO: 112586 - protein, 456 aa, Arabidopsis thaliana; identical to SEQ ID NO: 21315
  peptide (1)..(456): Ceres Seq. ID no. 13607625

SEQ ID NO: 112587 - DNA, 1249 bp, Arabidopsis thaliana; identical to SEQ ID NO: 101348
  misc_feature (1)..(1249): Ceres Seq. ID no. 13607626
  misc_feature (1)..(1249): Ortholog of  Ceres SEQ ID NO 13597019 as cited in SEQ ID NO 64303
  misc_feature (1)..(1249): Ortholog of  Ceres SEQ ID NO 13654191 as cited in SEQ ID NO 68235
  misc_feature (1)..(1249): Ortholog of  Ceres SEQ ID NO 15179513 as cited in SEQ ID NO 0

SEQ ID NO: 112588 - protein, 307 aa, Arabidopsis thaliana; identical to SEQ ID NO: 39873
  peptide (1)..(307): Ceres Seq. ID no. 13607627

SEQ ID NO: 112589 - protein, 252 aa, Arabidopsis thaliana; identical to SEQ ID NO: 39874
  peptide (1)..(252): Ceres Seq. ID no. 13607628

SEQ ID NO: 112590 - protein, 233 aa, Arabidopsis thaliana; identical to SEQ ID NO: 39875
  peptide (1)..(233): Ceres Seq. ID no. 13607629

SEQ ID NO: 112591 - DNA, 2211 bp, Arabidopsis thaliana; identical to SEQ ID NO: 101352
  misc_feature (1)..(2211): Ceres Seq. ID no. 13607633
  misc_feature (1)..(2211): Ortholog of  Ceres SEQ ID NO 13594037 as cited in SEQ ID NO 55666
  misc_feature (1)..(2211): Ortholog of  Ceres SEQ ID NO 13657707 as cited in SEQ ID NO 66407

SEQ ID NO: 112592 - protein, 588 aa, Arabidopsis thaliana; identical to SEQ ID NO: 40064
  peptide (1)..(588): Ceres Seq. ID no. 13607634

SEQ ID NO: 112593 - protein, 507 aa, Arabidopsis thaliana; identical to SEQ ID NO: 40065
  peptide (1)..(507): Ceres Seq. ID no. 13607635

SEQ ID NO: 112594 - protein, 487 aa, Arabidopsis thaliana; identical to SEQ ID NO: 40066
  peptide (1)..(487): Ceres Seq. ID no. 13607636

SEQ ID NO: 112595 - DNA, 850 bp, Arabidopsis thaliana; identical to SEQ ID NO: 101356
  misc_feature (1)..(850): Ceres Seq. ID no. 13607637
  misc_feature (1)..(850): Ortholog of  Ceres SEQ ID NO 13589868 as cited in SEQ ID NO 55521
  misc_feature (1)..(850): Ortholog of  Ceres SEQ ID NO 12617659 as cited in SEQ ID NO 65286
  misc_feature (1)..(850): Ortholog of  Ceres SEQ ID NO 12780566 as cited in SEQ ID NO 65822

SEQ ID NO: 112596 - protein, 181 aa, Arabidopsis thaliana; identical to SEQ ID NO: 29669
  peptide (1)..(181): Ceres Seq. ID no. 13607638

SEQ ID NO: 112597 - protein, 164 aa, Arabidopsis thaliana; identical to SEQ ID NO: 29670
  peptide (1)..(164): Ceres Seq. ID no. 13607639

SEQ ID NO: 112598 - protein, 160 aa, Arabidopsis thaliana; identical to SEQ ID NO: 29671
  peptide (1)..(160): Ceres Seq. ID no. 13607640

SEQ ID NO: 112599 - DNA, 636 bp, Arabidopsis thaliana; identical to SEQ ID NO: 101360
  misc_feature (1)..(636): Ceres Seq. ID no. 13607649
  misc_feature (1)..(636): Ortholog of  Ceres SEQ ID NO 13583505 as cited in SEQ ID NO 62240

SEQ ID NO: 112600 - protein, 109 aa, Arabidopsis thaliana; identical to SEQ ID NO: 22047
  peptide (1)..(109): Ceres Seq. ID no. 13607650

SEQ ID NO: 112601 - protein, 105 aa, Arabidopsis thaliana; identical to SEQ ID NO: 22048
  peptide (1)..(105): Ceres Seq. ID no. 13607651

SEQ ID NO: 112602 - protein, 82 aa, Arabidopsis thaliana; identical to SEQ ID NO: 22049
  peptide (1)..(82): Ceres Seq. ID no. 13607652

SEQ ID NO: 112603 - DNA, 1618 bp, Arabidopsis thaliana; identical to SEQ ID NO: 101364
  misc_feature (1)..(1618): Ceres Seq. ID no. 13607653
  misc_feature (1)..(1618): Ortholog of  Ceres SEQ ID NO 13639469 as cited in SEQ ID NO 54825
  misc_feature (1)..(1618): Ortholog of  Ceres SEQ ID NO 15179301 as cited in SEQ ID NO 0

SEQ ID NO: 112604 - protein, 470 aa, Arabidopsis thaliana; identical to SEQ ID NO: 101365
  peptide (1)..(470): Ceres Seq. ID no. 13607654

SEQ ID NO: 112605 - protein, 413 aa, Arabidopsis thaliana; identical to SEQ ID NO: 101366
  peptide (1)..(413): Ceres Seq. ID no. 13607655

SEQ ID NO: 112606 - protein, 303 aa, Arabidopsis thaliana; identical to SEQ ID NO: 43672
  peptide (1)..(303): Ceres Seq. ID no. 13607656

SEQ ID NO: 112607 - DNA, 893 bp, Arabidopsis thaliana; identical to SEQ ID NO: 101368
  misc_feature (1)..(893): Ceres Seq. ID no. 13607673
  misc_feature (1)..(893): Ortholog of  Ceres SEQ ID NO 13585560 as cited in SEQ ID NO 64470

SEQ ID NO: 112608 - protein, 189 aa, Arabidopsis thaliana; identical to SEQ ID NO: 36771
  peptide (1)..(189): Ceres Seq. ID no. 13607674

SEQ ID NO: 112609 - protein, 132 aa, Arabidopsis thaliana; identical to SEQ ID NO: 36772
  peptide (1)..(132): Ceres Seq. ID no. 13607675

SEQ ID NO: 112610 - protein, 116 aa, Arabidopsis thaliana; identical to SEQ ID NO: 36773
  peptide (1)..(116): Ceres Seq. ID no. 13607676

SEQ ID NO: 112611 - DNA, 2220 bp, Arabidopsis thaliana; identical to SEQ ID NO: 101372
  misc_feature (1)..(2220): Ceres Seq. ID no. 13607677
  misc_feature (1)..(2220): Ortholog of  Ceres SEQ ID NO 13596198 as cited in SEQ ID NO 68488

SEQ ID NO: 112612 - protein, 651 aa, Arabidopsis thaliana; identical to SEQ ID NO: 101373
  peptide (1)..(651): Ceres Seq. ID no. 13607678

SEQ ID NO: 112613 - protein, 606 aa, Arabidopsis thaliana; identical to SEQ ID NO: 101374
  peptide (1)..(606): Ceres Seq. ID no. 13607679

SEQ ID NO: 112614 - protein, 568 aa, Arabidopsis thaliana; identical to SEQ ID NO: 101375
  peptide (1)..(568): Ceres Seq. ID no. 13607680

SEQ ID NO: 112615 - DNA, 1776 bp, Arabidopsis thaliana; identical to SEQ ID NO: 101376
  misc_feature (1)..(1776): Ceres Seq. ID no. 13607702
  misc_feature (1)..(1776): Ortholog of  Ceres SEQ ID NO 15169670 as cited in SEQ ID NO 62085
  misc_feature (1)..(1776): Ortholog of  Ceres SEQ ID NO 13599262 as cited in SEQ ID NO 0

SEQ ID NO: 112616 - protein, 522 aa, Arabidopsis thaliana; identical to SEQ ID NO: 21748
  peptide (1)..(522): Ceres Seq. ID no. 13607703

SEQ ID NO: 112617 - protein, 520 aa, Arabidopsis thaliana; identical to SEQ ID NO: 21749
  peptide (1)..(520): Ceres Seq. ID no. 13607704

SEQ ID NO: 112618 - protein, 452 aa, Arabidopsis thaliana; identical to SEQ ID NO: 21750
  peptide (1)..(452): Ceres Seq. ID no. 13607705

SEQ ID NO: 112619 - DNA, 1387 bp, Arabidopsis thaliana; identical to SEQ ID NO: 101380
  misc_feature (1)..(1387): Ceres Seq. ID no. 13607714
  misc_feature (1)..(1387): Ortholog of  Ceres SEQ ID NO 13598582 as cited in SEQ ID NO 65294
  misc_feature (1)..(1387): Ortholog of  Ceres SEQ ID NO 15176114 as cited in SEQ ID NO 67627

SEQ ID NO: 112620 - protein, 387 aa, Arabidopsis thaliana; identical to SEQ ID NO: 101381
  peptide (1)..(387): Ceres Seq. ID no. 13607715

SEQ ID NO: 112621 - protein, 360 aa, Arabidopsis thaliana; identical to SEQ ID NO: 101382
  peptide (1)..(360): Ceres Seq. ID no. 13607716

SEQ ID NO: 112622 - protein, 268 aa, Arabidopsis thaliana; identical to SEQ ID NO: 101383
  peptide (1)..(268): Ceres Seq. ID no. 13607717

SEQ ID NO: 112623 - DNA, 1695 bp, Arabidopsis thaliana; identical to SEQ ID NO: 101384
  misc_feature (1)..(1695): Ceres Seq. ID no. 13607722
  misc_feature (1)..(1695): Ortholog of  Ceres SEQ ID NO 14307682 as cited in SEQ ID NO 54529

SEQ ID NO: 112624 - protein, 542 aa, Arabidopsis thaliana; identical to SEQ ID NO: 101385
  peptide (1)..(542): Ceres Seq. ID no. 13607723

SEQ ID NO: 112625 - protein, 457 aa, Arabidopsis thaliana; identical to SEQ ID NO: 101386
  peptide (1)..(457): Ceres Seq. ID no. 13607724

SEQ ID NO: 112626 - protein, 428 aa, Arabidopsis thaliana; identical to SEQ ID NO: 101387
  peptide (1)..(428): Ceres Seq. ID no. 13607725

SEQ ID NO: 112627 - DNA, 999 bp, Arabidopsis thaliana; identical to SEQ ID NO: 101388
  misc_feature (1)..(999): Ceres Seq. ID no. 13607730
  misc_feature (1)..(999): Ortholog of  Ceres SEQ ID NO 13583408 as cited in SEQ ID NO 62616
  misc_feature (1)..(999): Ortholog of  Ceres SEQ ID NO 15179752 as cited in SEQ ID NO 63074

SEQ ID NO: 112628 - protein, 242 aa, Arabidopsis thaliana; identical to SEQ ID NO: 29184
  peptide (1)..(242): Ceres Seq. ID no. 13607731

SEQ ID NO: 112629 - DNA, 514 bp, Arabidopsis thaliana; identical to SEQ ID NO: 101390
  misc_feature (1)..(514): Ceres Seq. ID no. 13607746
  misc_feature (1)..(514): Ortholog of  Ceres SEQ ID NO 12476115 as cited in SEQ ID NO 107

SEQ ID NO: 112630 - protein, 77 aa, Arabidopsis thaliana; identical to SEQ ID NO: 27682
  peptide (1)..(77): Ceres Seq. ID no. 13607747

SEQ ID NO: 112631 - protein, 73 aa, Arabidopsis thaliana; identical to SEQ ID NO: 27683
  peptide (1)..(73): Ceres Seq. ID no. 13607748

SEQ ID NO: 112632 - protein, 64 aa, Arabidopsis thaliana; identical to SEQ ID NO: 27684
  peptide (1)..(64): Ceres Seq. ID no. 13607749

SEQ ID NO: 112633 - protein, 55 aa, Arabidopsis thaliana; identical to SEQ ID NO: 27685
  peptide (1)..(55): Ceres Seq. ID no. 13607750

SEQ ID NO: 112634 - DNA, 666 bp, Arabidopsis thaliana; identical to SEQ ID NO: 101395
  misc_feature (1)..(666): Ceres Seq. ID no. 13607755
  misc_feature (1)..(666): Ortholog of  Ceres SEQ ID NO 12609339 as cited in SEQ ID NO 51780

SEQ ID NO: 112635 - protein, 221 aa, Arabidopsis thaliana; identical to SEQ ID NO: 77595
  peptide (1)..(221): Ceres Seq. ID no. 13607756

SEQ ID NO: 112636 - protein, 165 aa, Arabidopsis thaliana; identical to SEQ ID NO: 77596
  peptide (1)..(165): Ceres Seq. ID no. 13607757

SEQ ID NO: 112637 - protein, 144 aa, Arabidopsis thaliana; identical to SEQ ID NO: 88276
  peptide (1)..(144): Ceres Seq. ID no. 13607758

SEQ ID NO: 112638 - DNA, 1322 bp, Arabidopsis thaliana; identical to SEQ ID NO: 101399
  misc_feature (1)..(1322): Ceres Seq. ID no. 13607773
  misc_feature (1)..(1322): Ortholog of  Ceres SEQ ID NO 13655812 as cited in SEQ ID NO 64743

SEQ ID NO: 112639 - protein, 283 aa, Arabidopsis thaliana; identical to SEQ ID NO: 101400
  peptide (1)..(283): Ceres Seq. ID no. 13607774

SEQ ID NO: 112640 - protein, 255 aa, Arabidopsis thaliana; identical to SEQ ID NO: 101401
  peptide (1)..(255): Ceres Seq. ID no. 13607775

SEQ ID NO: 112641 - protein, 200 aa, Arabidopsis thaliana; identical to SEQ ID NO: 101402
  peptide (1)..(200): Ceres Seq. ID no. 13607776

SEQ ID NO: 112642 - DNA, 1338 bp, Arabidopsis thaliana; identical to SEQ ID NO: 101403
  misc_feature (1)..(1338): Ceres Seq. ID no. 13607777
  misc_feature (1)..(1338): Ortholog of  Ceres SEQ ID NO 15177500 as cited in SEQ ID NO 0

SEQ ID NO: 112643 - protein, 409 aa, Arabidopsis thaliana; identical to SEQ ID NO: 101404
  peptide (1)..(409): Ceres Seq. ID no. 13607778

SEQ ID NO: 112644 - protein, 404 aa, Arabidopsis thaliana; identical to SEQ ID NO: 101405
  peptide (1)..(404): Ceres Seq. ID no. 13607779

SEQ ID NO: 112645 - protein, 320 aa, Arabidopsis thaliana; identical to SEQ ID NO: 40238
  peptide (1)..(320): Ceres Seq. ID no. 13607780

SEQ ID NO: 112646 - DNA, 1284 bp, Arabidopsis thaliana; identical to SEQ ID NO: 101407
  misc_feature (1)..(1284): Ceres Seq. ID no. 13607788
  misc_feature (1)..(1284): Ortholog of  Ceres SEQ ID NO 14311131 as cited in SEQ ID NO 53729
  misc_feature (1)..(1284): Ortholog of  Ceres SEQ ID NO 13594037 as cited in SEQ ID NO 55666
  misc_feature (1)..(1284): Ortholog of  Ceres SEQ ID NO 13657707 as cited in SEQ ID NO 66407

SEQ ID NO: 112647 - protein, 263 aa, Arabidopsis thaliana; identical to SEQ ID NO: 101408
  peptide (1)..(263): Ceres Seq. ID no. 13607789

SEQ ID NO: 112648 - protein, 261 aa, Arabidopsis thaliana; identical to SEQ ID NO: 101409
  peptide (1)..(261): Ceres Seq. ID no. 13607790

SEQ ID NO: 112649 - protein, 226 aa, Arabidopsis thaliana; identical to SEQ ID NO: 101410
  peptide (1)..(226): Ceres Seq. ID no. 13607791

SEQ ID NO: 112650 - DNA, 1445 bp, Arabidopsis thaliana; identical to SEQ ID NO: 101411
  misc_feature (1)..(1445): Ceres Seq. ID no. 13607801
  misc_feature (1)..(1445): Ortholog of  Ceres SEQ ID NO 12582068 as cited in SEQ ID NO 51073
  misc_feature (1)..(1445): Ortholog of  Ceres SEQ ID NO 14303255 as cited in SEQ ID NO 0

SEQ ID NO: 112651 - protein, 419 aa, Arabidopsis thaliana; identical to SEQ ID NO: 101412
  peptide (1)..(419): Ceres Seq. ID no. 13607802

SEQ ID NO: 112652 - protein, 381 aa, Arabidopsis thaliana; identical to SEQ ID NO: 30312
  peptide (1)..(381): Ceres Seq. ID no. 13607803

SEQ ID NO: 112653 - protein, 368 aa, Arabidopsis thaliana; identical to SEQ ID NO: 30313
  peptide (1)..(368): Ceres Seq. ID no. 13607804

SEQ ID NO: 112654 - DNA, 1897 bp, Arabidopsis thaliana; identical to SEQ ID NO: 101415
  misc_feature (1)..(1897): Ceres Seq. ID no. 13607813
  misc_feature (1)..(1897): Ortholog of  Ceres SEQ ID NO 14310907 as cited in SEQ ID NO 54338

SEQ ID NO: 112655 - protein, 570 aa, Arabidopsis thaliana; identical to SEQ ID NO: 101416
  peptide (1)..(570): Ceres Seq. ID no. 13607814

SEQ ID NO: 112656 - protein, 488 aa, Arabidopsis thaliana; identical to SEQ ID NO: 91877
  peptide (1)..(488): Ceres Seq. ID no. 13607815

SEQ ID NO: 112657 - protein, 469 aa, Arabidopsis thaliana; identical to SEQ ID NO: 91878
  peptide (1)..(469): Ceres Seq. ID no. 13607816

SEQ ID NO: 112658 - DNA, 636 bp, Arabidopsis thaliana; identical to SEQ ID NO: 101419
  misc_feature (1)..(636): Ceres Seq. ID no. 13607830
  misc_feature (1)..(636): Ortholog of  Ceres SEQ ID NO 15174289 as cited in SEQ ID NO 1129
  misc_feature (1)..(636): Ortholog of  Ceres SEQ ID NO 12484054 as cited in SEQ ID NO 14991
  misc_feature (1)..(636): Ortholog of  Ceres SEQ ID NO 13591179 as cited in SEQ ID NO 64412

SEQ ID NO: 112659 - protein, 147 aa, Arabidopsis thaliana; identical to SEQ ID NO: 21147
  peptide (1)..(147): Ceres Seq. ID no. 13607831

SEQ ID NO: 112660 - protein, 129 aa, Arabidopsis thaliana; identical to SEQ ID NO: 21148
  peptide (1)..(129): Ceres Seq. ID no. 13607832

SEQ ID NO: 112661 - DNA, 1473 bp, Arabidopsis thaliana; identical to SEQ ID NO: 101422
  misc_feature (1)..(1473): Ceres Seq. ID no. 13607833
  misc_feature (1)..(1473): Ortholog of  Ceres SEQ ID NO 14306565 as cited in SEQ ID NO 53000
  misc_feature (1)..(1473): Ortholog of  Ceres SEQ ID NO 14315491 as cited in SEQ ID NO 57026
  misc_feature (1)..(1473): Ortholog of  Ceres SEQ ID NO 14312192 as cited in SEQ ID NO 59249

SEQ ID NO: 112662 - protein, 417 aa, Arabidopsis thaliana; identical to SEQ ID NO: 101423
  peptide (1)..(417): Ceres Seq. ID no. 13607834

SEQ ID NO: 112663 - protein, 302 aa, Arabidopsis thaliana; identical to SEQ ID NO: 101424
  peptide (1)..(302): Ceres Seq. ID no. 13607835

SEQ ID NO: 112664 - DNA, 984 bp, Arabidopsis thaliana; identical to SEQ ID NO: 101425
  misc_feature (1)..(984): Ceres Seq. ID no. 13607840
  misc_feature (1)..(984): Ortholog of  Ceres SEQ ID NO 13581804 as cited in SEQ ID NO 51424
  misc_feature (1)..(984): Ortholog of  Ceres SEQ ID NO 15169703 as cited in SEQ ID NO 59628
  misc_feature (1)..(984): Ortholog of  Ceres SEQ ID NO 13663874 as cited in SEQ ID NO 67003

SEQ ID NO: 112665 - protein, 240 aa, Arabidopsis thaliana; identical to SEQ ID NO: 101426
  peptide (1)..(240): Ceres Seq. ID no. 13607841

SEQ ID NO: 112666 - protein, 179 aa, Arabidopsis thaliana; identical to SEQ ID NO: 101427
  peptide (1)..(179): Ceres Seq. ID no. 13607842

SEQ ID NO: 112667 - protein, 131 aa, Arabidopsis thaliana; identical to SEQ ID NO: 101428
  peptide (1)..(131): Ceres Seq. ID no. 13607843

SEQ ID NO: 112668 - DNA, 1209 bp, Arabidopsis thaliana; identical to SEQ ID NO: 101429
  misc_feature (1)..(1209): Ceres Seq. ID no. 13607852
  misc_feature (1)..(1209): Ortholog of  Ceres SEQ ID NO 13581804 as cited in SEQ ID NO 51424
  misc_feature (1)..(1209): Ortholog of  Ceres SEQ ID NO 14310890 as cited in SEQ ID NO 54290
  misc_feature (1)..(1209): Ortholog of  Ceres SEQ ID NO 13663874 as cited in SEQ ID NO 67003

SEQ ID NO: 112669 - protein, 248 aa, Arabidopsis thaliana; identical to SEQ ID NO: 35284
  peptide (1)..(248): Ceres Seq. ID no. 13607853

SEQ ID NO: 112670 - DNA, 1252 bp, Arabidopsis thaliana; identical to SEQ ID NO: 101431
  misc_feature (1)..(1252): Ceres Seq. ID no. 13607854
  misc_feature (1)..(1252): Ortholog of  Ceres SEQ ID NO 14308359 as cited in SEQ ID NO 55097
  misc_feature (1)..(1252): Ortholog of  Ceres SEQ ID NO 15169195 as cited in SEQ ID NO 55200
  misc_feature (1)..(1252): Ortholog of  Ceres SEQ ID NO 13581611 as cited in SEQ ID NO 59028
  misc_feature (1)..(1252): Ortholog of  Ceres SEQ ID NO 14301693 as cited in SEQ ID NO 69246

SEQ ID NO: 112671 - protein, 264 aa, Arabidopsis thaliana; identical to SEQ ID NO: 35683
  peptide (1)..(264): Ceres Seq. ID no. 13607855

SEQ ID NO: 112672 - protein, 259 aa, Arabidopsis thaliana; identical to SEQ ID NO: 35684
  peptide (1)..(259): Ceres Seq. ID no. 13607856

SEQ ID NO: 112673 - protein, 258 aa, Arabidopsis thaliana; identical to SEQ ID NO: 35685
  peptide (1)..(258): Ceres Seq. ID no. 13607857

SEQ ID NO: 112674 - DNA, 1998 bp, Arabidopsis thaliana; identical to SEQ ID NO: 101435
  misc_feature (1)..(1998): Ceres Seq. ID no. 13607858
  misc_feature (1)..(1998): Ortholog of  Ceres SEQ ID NO 14307257 as cited in SEQ ID NO 54628

SEQ ID NO: 112675 - protein, 480 aa, Arabidopsis thaliana; identical to SEQ ID NO: 101436
  peptide (1)..(480): Ceres Seq. ID no. 13607859

SEQ ID NO: 112676 - protein, 414 aa, Arabidopsis thaliana; identical to SEQ ID NO: 101437
  peptide (1)..(414): Ceres Seq. ID no. 13607860

SEQ ID NO: 112677 - protein, 381 aa, Arabidopsis thaliana; identical to SEQ ID NO: 101438
  peptide (1)..(381): Ceres Seq. ID no. 13607861

SEQ ID NO: 112678 - DNA, 1682 bp, Arabidopsis thaliana; identical to SEQ ID NO: 101439
  misc_feature (1)..(1682): Ceres Seq. ID no. 13607862
  misc_feature (1)..(1682): Ortholog of  Ceres SEQ ID NO 14302935 as cited in SEQ ID NO 20442

SEQ ID NO: 112679 - protein, 484 aa, Arabidopsis thaliana; identical to SEQ ID NO: 77950
  peptide (1)..(484): Ceres Seq. ID no. 13607863

SEQ ID NO: 112680 - protein, 443 aa, Arabidopsis thaliana; identical to SEQ ID NO: 77951
  peptide (1)..(443): Ceres Seq. ID no. 13607864

SEQ ID NO: 112681 - protein, 395 aa, Arabidopsis thaliana; identical to SEQ ID NO: 74729
  peptide (1)..(395): Ceres Seq. ID no. 13607865

SEQ ID NO: 112682 - DNA, 1131 bp, Arabidopsis thaliana; identical to SEQ ID NO: 101443
  misc_feature (1)..(1131): Ceres Seq. ID no. 13607866
  misc_feature (1)..(1131): Ortholog of  Ceres SEQ ID NO 13639033 as cited in SEQ ID NO 55960

SEQ ID NO: 112683 - protein, 261 aa, Arabidopsis thaliana; identical to SEQ ID NO: 30919
  peptide (1)..(261): Ceres Seq. ID no. 13607867

SEQ ID NO: 112684 - protein, 258 aa, Arabidopsis thaliana; identical to SEQ ID NO: 30920
  peptide (1)..(258): Ceres Seq. ID no. 13607868

SEQ ID NO: 112685 - protein, 256 aa, Arabidopsis thaliana; identical to SEQ ID NO: 30921
  peptide (1)..(256): Ceres Seq. ID no. 13607869

SEQ ID NO: 112686 - DNA, 1444 bp, Arabidopsis thaliana; identical to SEQ ID NO: 101447
  misc_feature (1)..(1444): Ceres Seq. ID no. 13607874
  misc_feature (1)..(1444): Ortholog of  Ceres SEQ ID NO 15177414 as cited in SEQ ID NO 57242
  misc_feature (1)..(1444): Ortholog of  Ceres SEQ ID NO 13594151 as cited in SEQ ID NO 58886

SEQ ID NO: 112687 - protein, 220 aa, Arabidopsis thaliana; identical to SEQ ID NO: 101448
  peptide (1)..(220): Ceres Seq. ID no. 13607875

SEQ ID NO: 112688 - protein, 192 aa, Arabidopsis thaliana; identical to SEQ ID NO: 101449
  peptide (1)..(192): Ceres Seq. ID no. 13607876

SEQ ID NO: 112689 - protein, 170 aa, Arabidopsis thaliana; identical to SEQ ID NO: 101450
  peptide (1)..(170): Ceres Seq. ID no. 13607877

SEQ ID NO: 112690 - DNA, 939 bp, Arabidopsis thaliana; identical to SEQ ID NO: 101451
  misc_feature (1)..(939): Ceres Seq. ID no. 13607878
  misc_feature (1)..(939): Ortholog of  Ceres SEQ ID NO 13664283 as cited in SEQ ID NO 61283
  misc_feature (1)..(939): Ortholog of  Ceres SEQ ID NO 12635513 as cited in SEQ ID NO 0
  misc_feature (1)..(939): Ortholog of  Ceres SEQ ID NO 15179044 as cited in SEQ ID NO 0
  misc_feature (1)..(939): Ortholog of  Ceres SEQ ID NO 15179333 as cited in SEQ ID NO 0

SEQ ID NO: 112691 - protein, 276 aa, Arabidopsis thaliana; identical to SEQ ID NO: 101452
  peptide (1)..(276): Ceres Seq. ID no. 13607879

SEQ ID NO: 112692 - protein, 256 aa, Arabidopsis thaliana; identical to SEQ ID NO: 37618
  peptide (1)..(256): Ceres Seq. ID no. 13607880

SEQ ID NO: 112693 - protein, 161 aa, Arabidopsis thaliana; identical to SEQ ID NO: 37619
  peptide (1)..(161): Ceres Seq. ID no. 13607881

SEQ ID NO: 112694 - DNA, 1260 bp, Arabidopsis thaliana; identical to SEQ ID NO: 101455
  misc_feature (1)..(1260): Ceres Seq. ID no. 13607882
  misc_feature (1)..(1260): Ortholog of  Ceres SEQ ID NO 13597533 as cited in SEQ ID NO 64942

SEQ ID NO: 112695 - protein, 265 aa, Arabidopsis thaliana; identical to SEQ ID NO: 30750
  peptide (1)..(265): Ceres Seq. ID no. 13607883

SEQ ID NO: 112696 - protein, 259 aa, Arabidopsis thaliana; identical to SEQ ID NO: 30751
  peptide (1)..(259): Ceres Seq. ID no. 13607884

SEQ ID NO: 112697 - protein, 214 aa, Arabidopsis thaliana; identical to SEQ ID NO: 30752
  peptide (1)..(214): Ceres Seq. ID no. 13607885

SEQ ID NO: 112698 - DNA, 1296 bp, Arabidopsis thaliana; identical to SEQ ID NO: 101459
  misc_feature (1)..(1296): Ceres Seq. ID no. 13607906
  misc_feature (1)..(1296): Ortholog of  Ceres SEQ ID NO 14305750 as cited in SEQ ID NO 52458
  misc_feature (1)..(1296): Ortholog of  Ceres SEQ ID NO 14314252 as cited in SEQ ID NO 57492
  misc_feature (1)..(1296): Ortholog of  Ceres SEQ ID NO 12608276 as cited in SEQ ID NO 57871
  misc_feature (1)..(1296): Ortholog of  Ceres SEQ ID NO 13598492 as cited in SEQ ID NO 63882
  misc_feature (1)..(1296): Ortholog of  Ceres SEQ ID NO 13657914 as cited in SEQ ID NO 66230
  misc_feature (1)..(1296): Ortholog of  Ceres SEQ ID NO 13595877 as cited in SEQ ID NO 67702
  misc_feature (1)..(1296): Ortholog of  Ceres SEQ ID NO 13622667 as cited in SEQ ID NO 0

SEQ ID NO: 112699 - protein, 394 aa, Arabidopsis thaliana; identical to SEQ ID NO: 101460
  peptide (1)..(394): Ceres Seq. ID no. 13607907

SEQ ID NO: 112700 - protein, 374 aa, Arabidopsis thaliana; identical to SEQ ID NO: 101461
  peptide (1)..(374): Ceres Seq. ID no. 13607908

SEQ ID NO: 112701 - DNA, 1247 bp, Arabidopsis thaliana; identical to SEQ ID NO: 101462
  misc_feature (1)..(1247): Ceres Seq. ID no. 13607917
  misc_feature (1)..(1247): Ortholog of  Ceres SEQ ID NO 15178173 as cited in SEQ ID NO 54139
  misc_feature (1)..(1247): Ortholog of  Ceres SEQ ID NO 14304136 as cited in SEQ ID NO 59024

SEQ ID NO: 112702 - protein, 287 aa, Arabidopsis thaliana; identical to SEQ ID NO: 41742
  peptide (1)..(287): Ceres Seq. ID no. 13607918

SEQ ID NO: 112703 - protein, 255 aa, Arabidopsis thaliana; identical to SEQ ID NO: 41743
  peptide (1)..(255): Ceres Seq. ID no. 13607919

SEQ ID NO: 112704 - protein, 163 aa, Arabidopsis thaliana; identical to SEQ ID NO: 41744
  peptide (1)..(163): Ceres Seq. ID no. 13607920

SEQ ID NO: 112705 - DNA, 2363 bp, Arabidopsis thaliana; identical to SEQ ID NO: 101466
  misc_feature (1)..(2363): Ceres Seq. ID no. 13607948
  misc_feature (1)..(2363): Ortholog of  Ceres SEQ ID NO 14304565 as cited in SEQ ID NO 53297
  misc_feature (1)..(2363): Ortholog of  Ceres SEQ ID NO 15172170 as cited in SEQ ID NO 58957
  misc_feature (1)..(2363): Ortholog of  Ceres SEQ ID NO 13654989 as cited in SEQ ID NO 63117
  misc_feature (1)..(2363): Ortholog of  Ceres SEQ ID NO 13584744 as cited in SEQ ID NO 69137

SEQ ID NO: 112706 - protein, 755 aa, Arabidopsis thaliana; identical to SEQ ID NO: 101467
  peptide (1)..(755): Ceres Seq. ID no. 13607949

SEQ ID NO: 112707 - protein, 751 aa, Arabidopsis thaliana; identical to SEQ ID NO: 38317
  peptide (1)..(751): Ceres Seq. ID no. 13607950

SEQ ID NO: 112708 - DNA, 1015 bp, Arabidopsis thaliana; identical to SEQ ID NO: 101469
  misc_feature (1)..(1015): Ceres Seq. ID no. 13607959
  misc_feature (1)..(1015): Ortholog of  Ceres SEQ ID NO 12557432 as cited in SEQ ID NO 92
  misc_feature (1)..(1015): Ortholog of  Ceres SEQ ID NO 15224319 as cited in SEQ ID NO 66044
  misc_feature (1)..(1015): Ortholog of  Ceres SEQ ID NO 13598045 as cited in SEQ ID NO 66822

SEQ ID NO: 112709 - protein, 250 aa, Arabidopsis thaliana; identical to SEQ ID NO: 30939
  peptide (1)..(250): Ceres Seq. ID no. 13607960

SEQ ID NO: 112710 - protein, 226 aa, Arabidopsis thaliana; identical to SEQ ID NO: 30940
  peptide (1)..(226): Ceres Seq. ID no. 13607961

SEQ ID NO: 112711 - protein, 186 aa, Arabidopsis thaliana; identical to SEQ ID NO: 30941
  peptide (1)..(186): Ceres Seq. ID no. 13607962

SEQ ID NO: 112712 - DNA, 1816 bp, Arabidopsis thaliana; identical to SEQ ID NO: 101473
  misc_feature (1)..(1816): Ceres Seq. ID no. 13607971
  misc_feature (1)..(1816): Ortholog of  Ceres SEQ ID NO 15169220 as cited in SEQ ID NO 55481

SEQ ID NO: 112713 - protein, 510 aa, Arabidopsis thaliana; identical to SEQ ID NO: 101474
  peptide (1)..(510): Ceres Seq. ID no. 13607972

SEQ ID NO: 112714 - protein, 453 aa, Arabidopsis thaliana; identical to SEQ ID NO: 101475
  peptide (1)..(453): Ceres Seq. ID no. 13607973

SEQ ID NO: 112715 - protein, 452 aa, Arabidopsis thaliana; identical to SEQ ID NO: 101476
  peptide (1)..(452): Ceres Seq. ID no. 13607974

SEQ ID NO: 112716 - DNA, 964 bp, Arabidopsis thaliana; identical to SEQ ID NO: 101477
  misc_feature (1)..(964): Ceres Seq. ID no. 13607987
  misc_feature (1)..(964): Ortholog of  Ceres SEQ ID NO 15174311 as cited in SEQ ID NO 0

SEQ ID NO: 112717 - protein, 252 aa, Arabidopsis thaliana; identical to SEQ ID NO: 101478
  peptide (1)..(252): Ceres Seq. ID no. 13607988

SEQ ID NO: 112718 - protein, 234 aa, Arabidopsis thaliana; identical to SEQ ID NO: 24960
  peptide (1)..(234): Ceres Seq. ID no. 13607989

SEQ ID NO: 112719 - protein, 188 aa, Arabidopsis thaliana; identical to SEQ ID NO: 24961
  peptide (1)..(188): Ceres Seq. ID no. 13607990

SEQ ID NO: 112720 - DNA, 1407 bp, Arabidopsis thaliana; identical to SEQ ID NO: 101481
  misc_feature (1)..(1407): Ceres Seq. ID no. 13607991
  misc_feature (1)..(1407): Ortholog of  Ceres SEQ ID NO 14313471 as cited in SEQ ID NO 64513
  misc_feature (1)..(1407): Ortholog of  Ceres SEQ ID NO 13591377 as cited in SEQ ID NO 66534

SEQ ID NO: 112721 - protein, 391 aa, Arabidopsis thaliana; identical to SEQ ID NO: 101482
  peptide (1)..(391): Ceres Seq. ID no. 13607992

SEQ ID NO: 112722 - protein, 362 aa, Arabidopsis thaliana; identical to SEQ ID NO: 30928
  peptide (1)..(362): Ceres Seq. ID no. 13607993

SEQ ID NO: 112723 - protein, 351 aa, Arabidopsis thaliana; identical to SEQ ID NO: 30929
  peptide (1)..(351): Ceres Seq. ID no. 13607994

SEQ ID NO: 112724 - DNA, 647 bp, Arabidopsis thaliana; identical to SEQ ID NO: 101485
  misc_feature (1)..(647): Ceres Seq. ID no. 13608003
  misc_feature (1)..(647): Ortholog of  Ceres SEQ ID NO 13599881 as cited in SEQ ID NO 1319
  misc_feature (1)..(647): Ortholog of  Ceres SEQ ID NO 13600163 as cited in SEQ ID NO 0

SEQ ID NO: 112725 - protein, 112 aa, Arabidopsis thaliana; identical to SEQ ID NO: 21690
  peptide (1)..(112): Ceres Seq. ID no. 13608004

SEQ ID NO: 112726 - DNA, 1030 bp, Arabidopsis thaliana; identical to SEQ ID NO: 101487
  misc_feature (1)..(1030): Ceres Seq. ID no. 13608012
  misc_feature (1)..(1030): Ortholog of  Ceres SEQ ID NO 12557497 as cited in SEQ ID NO 43

SEQ ID NO: 112727 - protein, 280 aa, Arabidopsis thaliana; identical to SEQ ID NO: 25086
  peptide (1)..(280): Ceres Seq. ID no. 13608013

SEQ ID NO: 112728 - protein, 272 aa, Arabidopsis thaliana; identical to SEQ ID NO: 25087
  peptide (1)..(272): Ceres Seq. ID no. 13608014

SEQ ID NO: 112729 - protein, 159 aa, Arabidopsis thaliana; identical to SEQ ID NO: 25088
  peptide (1)..(159): Ceres Seq. ID no. 13608015

SEQ ID NO: 112730 - DNA, 1219 bp, Arabidopsis thaliana; identical to SEQ ID NO: 101491
  misc_feature (1)..(1219): Ceres Seq. ID no. 13608020
  misc_feature (1)..(1219): Ortholog of  Ceres SEQ ID NO 15168476 as cited in SEQ ID NO 60262

SEQ ID NO: 112731 - protein, 324 aa, Arabidopsis thaliana; identical to SEQ ID NO: 101492
  peptide (1)..(324): Ceres Seq. ID no. 13608021

SEQ ID NO: 112732 - protein, 225 aa, Arabidopsis thaliana; identical to SEQ ID NO: 101493
  peptide (1)..(225): Ceres Seq. ID no. 13608022

SEQ ID NO: 112733 - protein, 171 aa, Arabidopsis thaliana; identical to SEQ ID NO: 101494
  peptide (1)..(171): Ceres Seq. ID no. 13608023

SEQ ID NO: 112734 - DNA, 1253 bp, Arabidopsis thaliana; identical to SEQ ID NO: 101495
  misc_feature (1)..(1253): Ceres Seq. ID no. 13608024
  misc_feature (1)..(1253): Ortholog of  Ceres SEQ ID NO 15177091 as cited in SEQ ID NO 52140
  misc_feature (1)..(1253): Ortholog of  Ceres SEQ ID NO 15172539 as cited in SEQ ID NO 57333
  misc_feature (1)..(1253): Ortholog of  Ceres SEQ ID NO 14315951 as cited in SEQ ID NO 57634
  misc_feature (1)..(1253): Ortholog of  Ceres SEQ ID NO 13597324 as cited in SEQ ID NO 64842
  misc_feature (1)..(1253): Ortholog of  Ceres SEQ ID NO 13658672 as cited in SEQ ID NO 66627

SEQ ID NO: 112735 - protein, 300 aa, Arabidopsis thaliana; identical to SEQ ID NO: 101496
  peptide (1)..(300): Ceres Seq. ID no. 13608025

SEQ ID NO: 112736 - protein, 159 aa, Arabidopsis thaliana; identical to SEQ ID NO: 101497
  peptide (1)..(159): Ceres Seq. ID no. 13608026

SEQ ID NO: 112737 - DNA, 1224 bp, Arabidopsis thaliana; identical to SEQ ID NO: 101498
  misc_feature (1)..(1224): Ceres Seq. ID no. 13608027
  misc_feature (1)..(1224): Ortholog of  Ceres SEQ ID NO 13598527 as cited in SEQ ID NO 64914

SEQ ID NO: 112738 - protein, 357 aa, Arabidopsis thaliana; identical to SEQ ID NO: 101499
  peptide (1)..(357): Ceres Seq. ID no. 13608028

SEQ ID NO: 112739 - protein, 332 aa, Arabidopsis thaliana; identical to SEQ ID NO: 86804
  peptide (1)..(332): Ceres Seq. ID no. 13608029

SEQ ID NO: 112740 - protein, 307 aa, Arabidopsis thaliana; identical to SEQ ID NO: 86805
  peptide (1)..(307): Ceres Seq. ID no. 13608030

SEQ ID NO: 112741 - DNA, 1385 bp, Arabidopsis thaliana; identical to SEQ ID NO: 101502
  misc_feature (1)..(1385): Ceres Seq. ID no. 13608035
  misc_feature (1)..(1385): Ortholog of  Ceres SEQ ID NO 14313147 as cited in SEQ ID NO 54166
  misc_feature (1)..(1385): Ortholog of  Ceres SEQ ID NO 13598882 as cited in SEQ ID NO 0

SEQ ID NO: 112742 - protein, 361 aa, Arabidopsis thaliana; identical to SEQ ID NO: 23301
  peptide (1)..(361): Ceres Seq. ID no. 13608036

SEQ ID NO: 112743 - protein, 308 aa, Arabidopsis thaliana; identical to SEQ ID NO: 23302
  peptide (1)..(308): Ceres Seq. ID no. 13608037

SEQ ID NO: 112744 - protein, 232 aa, Arabidopsis thaliana; identical to SEQ ID NO: 23303
  peptide (1)..(232): Ceres Seq. ID no. 13608038

SEQ ID NO: 112745 - DNA, 1158 bp, Arabidopsis thaliana; identical to SEQ ID NO: 101506
  misc_feature (1)..(1158): Ceres Seq. ID no. 13608043
  misc_feature (1)..(1158): Ortholog of  Ceres SEQ ID NO 14311659 as cited in SEQ ID NO 51212
  misc_feature (1)..(1158): Ortholog of  Ceres SEQ ID NO 12635180 as cited in SEQ ID NO 0

SEQ ID NO: 112746 - protein, 331 aa, Arabidopsis thaliana; identical to SEQ ID NO: 38250
  peptide (1)..(331): Ceres Seq. ID no. 13608044

SEQ ID NO: 112747 - protein, 230 aa, Arabidopsis thaliana; identical to SEQ ID NO: 38251
  peptide (1)..(230): Ceres Seq. ID no. 13608045

SEQ ID NO: 112748 - protein, 169 aa, Arabidopsis thaliana; identical to SEQ ID NO: 38252
  peptide (1)..(169): Ceres Seq. ID no. 13608046

SEQ ID NO: 112749 - DNA, 1189 bp, Arabidopsis thaliana; identical to SEQ ID NO: 101510
  misc_feature (1)..(1189): Ceres Seq. ID no. 13608047
  misc_feature (1)..(1189): Ortholog of  Ceres SEQ ID NO 15173696 as cited in SEQ ID NO 59972

SEQ ID NO: 112750 - protein, 278 aa, Arabidopsis thaliana; identical to SEQ ID NO: 37129
  peptide (1)..(278): Ceres Seq. ID no. 13608048

SEQ ID NO: 112751 - protein, 216 aa, Arabidopsis thaliana; identical to SEQ ID NO: 37130
  peptide (1)..(216): Ceres Seq. ID no. 13608049

SEQ ID NO: 112752 - protein, 211 aa, Arabidopsis thaliana; identical to SEQ ID NO: 37131
  peptide (1)..(211): Ceres Seq. ID no. 13608050

SEQ ID NO: 112753 - DNA, 563 bp, Arabidopsis thaliana; identical to SEQ ID NO: 101514
  misc_feature (1)..(563): Ceres Seq. ID no. 13608051
  misc_feature (1)..(563): Ortholog of  Ceres SEQ ID NO 14309553 as cited in SEQ ID NO 52735
  misc_feature (1)..(563): Ortholog of  Ceres SEQ ID NO 15172828 as cited in SEQ ID NO 60174
  misc_feature (1)..(563): Ortholog of  Ceres SEQ ID NO 12483999 as cited in SEQ ID NO 0

SEQ ID NO: 112754 - protein, 114 aa, Arabidopsis thaliana; identical to SEQ ID NO: 21573
  peptide (1)..(114): Ceres Seq. ID no. 13608052

SEQ ID NO: 112755 - DNA, 1271 bp, Arabidopsis thaliana; identical to SEQ ID NO: 101516
  misc_feature (1)..(1271): Ceres Seq. ID no. 13608053
  misc_feature (1)..(1271): Ortholog of  Ceres SEQ ID NO 14311961 as cited in SEQ ID NO 51512

SEQ ID NO: 112756 - protein, 386 aa, Arabidopsis thaliana; identical to SEQ ID NO: 24767
  peptide (1)..(386): Ceres Seq. ID no. 13608054

SEQ ID NO: 112757 - protein, 371 aa, Arabidopsis thaliana; identical to SEQ ID NO: 24768
  peptide (1)..(371): Ceres Seq. ID no. 13608055

SEQ ID NO: 112758 - DNA, 987 bp, Arabidopsis thaliana; identical to SEQ ID NO: 101519
  misc_feature (1)..(987): Ceres Seq. ID no. 13608068
  misc_feature (1)..(987): Ortholog of  Ceres SEQ ID NO 15172070 as cited in SEQ ID NO 59663

SEQ ID NO: 112759 - protein, 237 aa, Arabidopsis thaliana; identical to SEQ ID NO: 101520
  peptide (1)..(237): Ceres Seq. ID no. 13608069

SEQ ID NO: 112760 - protein, 167 aa, Arabidopsis thaliana; identical to SEQ ID NO: 38029
  peptide (1)..(167): Ceres Seq. ID no. 13608070

SEQ ID NO: 112761 - protein, 138 aa, Arabidopsis thaliana; identical to SEQ ID NO: 38030
  peptide (1)..(138): Ceres Seq. ID no. 13608071

SEQ ID NO: 112762 - DNA, 1679 bp, Arabidopsis thaliana; identical to SEQ ID NO: 101523
  misc_feature (1)..(1679): Ceres Seq. ID no. 13608072
  misc_feature (1)..(1679): Ortholog of  Ceres SEQ ID NO 14314643 as cited in SEQ ID NO 56903

SEQ ID NO: 112763 - protein, 473 aa, Arabidopsis thaliana; identical to SEQ ID NO: 101524
  peptide (1)..(473): Ceres Seq. ID no. 13608073

SEQ ID NO: 112764 - protein, 437 aa, Arabidopsis thaliana; identical to SEQ ID NO: 101525
  peptide (1)..(437): Ceres Seq. ID no. 13608074

SEQ ID NO: 112765 - protein, 422 aa, Arabidopsis thaliana; identical to SEQ ID NO: 101526
  peptide (1)..(422): Ceres Seq. ID no. 13608075

SEQ ID NO: 112766 - DNA, 1410 bp, Arabidopsis thaliana; identical to SEQ ID NO: 101527
  misc_feature (1)..(1410): Ceres Seq. ID no. 13608076
  misc_feature (1)..(1410): Ortholog of  Ceres SEQ ID NO 15171442 as cited in SEQ ID NO 51520

SEQ ID NO: 112767 - protein, 226 aa, Arabidopsis thaliana; identical to SEQ ID NO: 39670
  peptide (1)..(226): Ceres Seq. ID no. 13608077

SEQ ID NO: 112768 - protein, 224 aa, Arabidopsis thaliana; identical to SEQ ID NO: 39671
  peptide (1)..(224): Ceres Seq. ID no. 13608078

SEQ ID NO: 112769 - DNA, 844 bp, Arabidopsis thaliana; identical to SEQ ID NO: 101530
  misc_feature (1)..(844): Ceres Seq. ID no. 13608079
  misc_feature (1)..(844): Ortholog of  Ceres SEQ ID NO 13585222 as cited in SEQ ID NO 68696

SEQ ID NO: 112770 - protein, 202 aa, Arabidopsis thaliana; identical to SEQ ID NO: 101531
  peptide (1)..(202): Ceres Seq. ID no. 13608080

SEQ ID NO: 112771 - protein, 121 aa, Arabidopsis thaliana; identical to SEQ ID NO: 101532
  peptide (1)..(121): Ceres Seq. ID no. 13608081

SEQ ID NO: 112772 - protein, 101 aa, Arabidopsis thaliana; identical to SEQ ID NO: 101533
  peptide (1)..(101): Ceres Seq. ID no. 13608082

SEQ ID NO: 112773 - DNA, 2019 bp, Arabidopsis thaliana; identical to SEQ ID NO: 101534
  misc_feature (1)..(2019): Ceres Seq. ID no. 13608087
  misc_feature (1)..(2019): Ortholog of  Ceres SEQ ID NO 13582619 as cited in SEQ ID NO 56520
  misc_feature (1)..(2019): Ortholog of  Ceres SEQ ID NO 12611392 as cited in SEQ ID NO 56826
  misc_feature (1)..(2019): Ortholog of  Ceres SEQ ID NO 13660872 as cited in SEQ ID NO 60830

SEQ ID NO: 112774 - protein, 617 aa, Arabidopsis thaliana; identical to SEQ ID NO: 101535
  peptide (1)..(617): Ceres Seq. ID no. 13608088

SEQ ID NO: 112775 - protein, 564 aa, Arabidopsis thaliana; identical to SEQ ID NO: 101536
  peptide (1)..(564): Ceres Seq. ID no. 13608089

SEQ ID NO: 112776 - protein, 499 aa, Arabidopsis thaliana; identical to SEQ ID NO: 101537
  peptide (1)..(499): Ceres Seq. ID no. 13608090

SEQ ID NO: 112777 - DNA, 1220 bp, Arabidopsis thaliana; identical to SEQ ID NO: 101538
  misc_feature (1)..(1220): Ceres Seq. ID no. 13608091
  misc_feature (1)..(1220): Ortholog of  Ceres SEQ ID NO 13596030 as cited in SEQ ID NO 62043

SEQ ID NO: 112778 - protein, 342 aa, Arabidopsis thaliana; identical to SEQ ID NO: 23839
  peptide (1)..(342): Ceres Seq. ID no. 13608092

SEQ ID NO: 112779 - protein, 337 aa, Arabidopsis thaliana; identical to SEQ ID NO: 23840
  peptide (1)..(337): Ceres Seq. ID no. 13608093

SEQ ID NO: 112780 - protein, 333 aa, Arabidopsis thaliana; identical to SEQ ID NO: 23841
  peptide (1)..(333): Ceres Seq. ID no. 13608094

SEQ ID NO: 112781 - DNA, 1287 bp, Arabidopsis thaliana; identical to SEQ ID NO: 101542
  misc_feature (1)..(1287): Ceres Seq. ID no. 13608099
  misc_feature (1)..(1287): Ortholog of  Ceres SEQ ID NO 13597041 as cited in SEQ ID NO 63502

SEQ ID NO: 112782 - protein, 362 aa, Arabidopsis thaliana; identical to SEQ ID NO: 101543
  peptide (1)..(362): Ceres Seq. ID no. 13608100

SEQ ID NO: 112783 - protein, 270 aa, Arabidopsis thaliana; identical to SEQ ID NO: 101544
  peptide (1)..(270): Ceres Seq. ID no. 13608101

SEQ ID NO: 112784 - DNA, 981 bp, Arabidopsis thaliana; identical to SEQ ID NO: 101545
  misc_feature (1)..(981): Ceres Seq. ID no. 13608111
  misc_feature (1)..(981): Ortholog of  Ceres SEQ ID NO 13574788 as cited in SEQ ID NO 68
  misc_feature (1)..(981): Ortholog of  Ceres SEQ ID NO 12609388 as cited in SEQ ID NO 52081
  misc_feature (1)..(981): Ortholog of  Ceres SEQ ID NO 14309072 as cited in SEQ ID NO 0

SEQ ID NO: 112785 - protein, 209 aa, Arabidopsis thaliana; identical to SEQ ID NO: 25348
  peptide (1)..(209): Ceres Seq. ID no. 13608112

SEQ ID NO: 112786 - protein, 205 aa, Arabidopsis thaliana; identical to SEQ ID NO: 25349
  peptide (1)..(205): Ceres Seq. ID no. 13608113

SEQ ID NO: 112787 - protein, 203 aa, Arabidopsis thaliana; identical to SEQ ID NO: 25350
  peptide (1)..(203): Ceres Seq. ID no. 13608114

SEQ ID NO: 112788 - DNA, 1953 bp, Arabidopsis thaliana; identical to SEQ ID NO: 101549
  misc_feature (1)..(1953): Ceres Seq. ID no. 13608127
  misc_feature (1)..(1953): Ortholog of  Ceres SEQ ID NO 13639469 as cited in SEQ ID NO 54825
  misc_feature (1)..(1953): Ortholog of  Ceres SEQ ID NO 15179301 as cited in SEQ ID NO 0

SEQ ID NO: 112789 - protein, 588 aa, Arabidopsis thaliana; identical to SEQ ID NO: 101550
  peptide (1)..(588): Ceres Seq. ID no. 13608128

SEQ ID NO: 112790 - protein, 571 aa, Arabidopsis thaliana; identical to SEQ ID NO: 101551
  peptide (1)..(571): Ceres Seq. ID no. 13608129

SEQ ID NO: 112791 - protein, 513 aa, Arabidopsis thaliana; identical to SEQ ID NO: 101552
  peptide (1)..(513): Ceres Seq. ID no. 13608130

SEQ ID NO: 112792 - DNA, 1443 bp, Arabidopsis thaliana; identical to SEQ ID NO: 101553
  misc_feature (1)..(1443): Ceres Seq. ID no. 13608143
  misc_feature (1)..(1443): Ortholog of  Ceres SEQ ID NO 14311207 as cited in SEQ ID NO 60304

SEQ ID NO: 112793 - protein, 287 aa, Arabidopsis thaliana; identical to SEQ ID NO: 101554
  peptide (1)..(287): Ceres Seq. ID no. 13608144

SEQ ID NO: 112794 - protein, 223 aa, Arabidopsis thaliana; identical to SEQ ID NO: 101555
  peptide (1)..(223): Ceres Seq. ID no. 13608145

SEQ ID NO: 112795 - DNA, 1722 bp, Arabidopsis thaliana; identical to SEQ ID NO: 101556
  misc_feature (1)..(1722): Ceres Seq. ID no. 13608172
  misc_feature (1)..(1722): Ortholog of  Ceres SEQ ID NO 14302251 as cited in SEQ ID NO 62093

SEQ ID NO: 112796 - protein, 436 aa, Arabidopsis thaliana; identical to SEQ ID NO: 26763
  peptide (1)..(436): Ceres Seq. ID no. 13608173

SEQ ID NO: 112797 - protein, 411 aa, Arabidopsis thaliana; identical to SEQ ID NO: 26764
  peptide (1)..(411): Ceres Seq. ID no. 13608174

SEQ ID NO: 112798 - protein, 409 aa, Arabidopsis thaliana; identical to SEQ ID NO: 26765
  peptide (1)..(409): Ceres Seq. ID no. 13608175

SEQ ID NO: 112799 - DNA, 1448 bp, Arabidopsis thaliana; identical to SEQ ID NO: 101560
  misc_feature (1)..(1448): Ceres Seq. ID no. 13608180
  misc_feature (1)..(1448): Ortholog of  Ceres SEQ ID NO 14312769 as cited in SEQ ID NO 55493
  misc_feature (1)..(1448): Ortholog of  Ceres SEQ ID NO 13639300 as cited in SEQ ID NO 56701

SEQ ID NO: 112800 - protein, 379 aa, Arabidopsis thaliana; identical to SEQ ID NO: 40524
  peptide (1)..(379): Ceres Seq. ID no. 13608181

SEQ ID NO: 112801 - protein, 346 aa, Arabidopsis thaliana; identical to SEQ ID NO: 40525
  peptide (1)..(346): Ceres Seq. ID no. 13608182

SEQ ID NO: 112802 - protein, 317 aa, Arabidopsis thaliana; identical to SEQ ID NO: 40526
  peptide (1)..(317): Ceres Seq. ID no. 13608183

SEQ ID NO: 112803 - DNA, 3682 bp, Arabidopsis thaliana; identical to SEQ ID NO: 101564
  misc_feature (1)..(3682): Ceres Seq. ID no. 13608184
  misc_feature (1)..(3682): Ortholog of  Ceres SEQ ID NO 14303959 as cited in SEQ ID NO 53709

SEQ ID NO: 112804 - protein, 934 aa, Arabidopsis thaliana; identical to SEQ ID NO: 44315
  peptide (1)..(934): Ceres Seq. ID no. 13608185

SEQ ID NO: 112805 - protein, 903 aa, Arabidopsis thaliana; identical to SEQ ID NO: 44316
  peptide (1)..(903): Ceres Seq. ID no. 13608186

SEQ ID NO: 112806 - protein, 878 aa, Arabidopsis thaliana; identical to SEQ ID NO: 44317
  peptide (1)..(878): Ceres Seq. ID no. 13608187

SEQ ID NO: 112807 - DNA, 1883 bp, Arabidopsis thaliana; identical to SEQ ID NO: 101568
  misc_feature (1)..(1883): Ceres Seq. ID no. 13608188
  misc_feature (1)..(1883): Ortholog of  Ceres SEQ ID NO 14301836 as cited in SEQ ID NO 67386

SEQ ID NO: 112808 - protein, 252 aa, Arabidopsis thaliana; identical to SEQ ID NO: 101569
  peptide (1)..(252): Ceres Seq. ID no. 13608189

SEQ ID NO: 112809 - protein, 245 aa, Arabidopsis thaliana; identical to SEQ ID NO: 39186
  peptide (1)..(245): Ceres Seq. ID no. 13608190

SEQ ID NO: 112810 - protein, 142 aa, Arabidopsis thaliana; identical to SEQ ID NO: 39187
  peptide (1)..(142): Ceres Seq. ID no. 13608191

SEQ ID NO: 112811 - DNA, 2530 bp, Arabidopsis thaliana; identical to SEQ ID NO: 101572
  misc_feature (1)..(2530): Ceres Seq. ID no. 13608200
  misc_feature (1)..(2530): Ortholog of  Ceres SEQ ID NO 14302891 as cited in SEQ ID NO 66282

SEQ ID NO: 112812 - protein, 803 aa, Arabidopsis thaliana; identical to SEQ ID NO: 101573
  peptide (1)..(803): Ceres Seq. ID no. 13608201

SEQ ID NO: 112813 - protein, 787 aa, Arabidopsis thaliana; identical to SEQ ID NO: 101574
  peptide (1)..(787): Ceres Seq. ID no. 13608202

SEQ ID NO: 112814 - protein, 748 aa, Arabidopsis thaliana; identical to SEQ ID NO: 101575
  peptide (1)..(748): Ceres Seq. ID no. 13608203

SEQ ID NO: 112815 - DNA, 1400 bp, Arabidopsis thaliana; identical to SEQ ID NO: 101576
  misc_feature (1)..(1400): Ceres Seq. ID no. 13608212
  misc_feature (1)..(1400): Ortholog of  Ceres SEQ ID NO 13655375 as cited in SEQ ID NO 63347
  misc_feature (1)..(1400): Ortholog of  Ceres SEQ ID NO 12626166 as cited in SEQ ID NO 64505
  misc_feature (1)..(1400): Ortholog of  Ceres SEQ ID NO 13654415 as cited in SEQ ID NO 68820

SEQ ID NO: 112816 - protein, 335 aa, Arabidopsis thaliana; identical to SEQ ID NO: 101577
  peptide (1)..(335): Ceres Seq. ID no. 13608213

SEQ ID NO: 112817 - protein, 317 aa, Arabidopsis thaliana; identical to SEQ ID NO: 101578
  peptide (1)..(317): Ceres Seq. ID no. 13608214

SEQ ID NO: 112818 - protein, 300 aa, Arabidopsis thaliana; identical to SEQ ID NO: 101579
  peptide (1)..(300): Ceres Seq. ID no. 13608215

SEQ ID NO: 112819 - DNA, 782 bp, Arabidopsis thaliana; identical to SEQ ID NO: 101580
  misc_feature (1)..(782): Ceres Seq. ID no. 13608216
  misc_feature (1)..(782): Ortholog of  Ceres SEQ ID NO 15177027 as cited in SEQ ID NO 58171

SEQ ID NO: 112820 - protein, 163 aa, Arabidopsis thaliana; identical to SEQ ID NO: 101581
  peptide (1)..(163): Ceres Seq. ID no. 13608217

SEQ ID NO: 112821 - protein, 156 aa, Arabidopsis thaliana; identical to SEQ ID NO: 101582
  peptide (1)..(156): Ceres Seq. ID no. 13608218

SEQ ID NO: 112822 - protein, 112 aa, Arabidopsis thaliana; identical to SEQ ID NO: 101583
  peptide (1)..(112): Ceres Seq. ID no. 13608219

SEQ ID NO: 112823 - DNA, 1755 bp, Arabidopsis thaliana; identical to SEQ ID NO: 101584
  misc_feature (1)..(1755): Ceres Seq. ID no. 13608220
  misc_feature (1)..(1755): Ortholog of  Ceres SEQ ID NO 15168509 as cited in SEQ ID NO 57909
  misc_feature (1)..(1755): Ortholog of  Ceres SEQ ID NO 13594429 as cited in SEQ ID NO 58006
  misc_feature (1)..(1755): Ortholog of  Ceres SEQ ID NO 13661403 as cited in SEQ ID NO 61549

SEQ ID NO: 112824 - protein, 499 aa, Arabidopsis thaliana; identical to SEQ ID NO: 101585
  peptide (1)..(499): Ceres Seq. ID no. 13608221

SEQ ID NO: 112825 - protein, 449 aa, Arabidopsis thaliana; identical to SEQ ID NO: 101586
  peptide (1)..(449): Ceres Seq. ID no. 13608222

SEQ ID NO: 112826 - protein, 419 aa, Arabidopsis thaliana; identical to SEQ ID NO: 101587
  peptide (1)..(419): Ceres Seq. ID no. 13608223

SEQ ID NO: 112827 - DNA, 1527 bp, Arabidopsis thaliana; identical to SEQ ID NO: 101588
  misc_feature (1)..(1527): Ceres Seq. ID no. 13608224
  misc_feature (1)..(1527): Ortholog of  Ceres SEQ ID NO 14315430 as cited in SEQ ID NO 57618
  misc_feature (1)..(1527): Ortholog of  Ceres SEQ ID NO 13623344 as cited in SEQ ID NO 0

SEQ ID NO: 112828 - protein, 317 aa, Arabidopsis thaliana; identical to SEQ ID NO: 22591
  peptide (1)..(317): Ceres Seq. ID no. 13608225

SEQ ID NO: 112829 - protein, 245 aa, Arabidopsis thaliana; identical to SEQ ID NO: 22592
  peptide (1)..(245): Ceres Seq. ID no. 13608226

SEQ ID NO: 112830 - protein, 232 aa, Arabidopsis thaliana; identical to SEQ ID NO: 22593
  peptide (1)..(232): Ceres Seq. ID no. 13608227

SEQ ID NO: 112831 - DNA, 717 bp, Arabidopsis thaliana; identical to SEQ ID NO: 101592
  misc_feature (1)..(717): Ceres Seq. ID no. 13608228
  misc_feature (1)..(717): Ortholog of  Ceres SEQ ID NO 15225657 as cited in SEQ ID NO 329

SEQ ID NO: 112832 - protein, 126 aa, Arabidopsis thaliana; identical to SEQ ID NO: 36334
  peptide (1)..(126): Ceres Seq. ID no. 13608229

SEQ ID NO: 112833 - protein, 123 aa, Arabidopsis thaliana; identical to SEQ ID NO: 36335
  peptide (1)..(123): Ceres Seq. ID no. 13608230

SEQ ID NO: 112834 - protein, 90 aa, Arabidopsis thaliana; identical to SEQ ID NO: 36336
  peptide (1)..(90): Ceres Seq. ID no. 13608231

SEQ ID NO: 112835 - DNA, 1819 bp, Arabidopsis thaliana; identical to SEQ ID NO: 101596
  misc_feature (1)..(1819): Ceres Seq. ID no. 13608236
  misc_feature (1)..(1819): Ortholog of  Ceres SEQ ID NO 14307916 as cited in SEQ ID NO 66395

SEQ ID NO: 112836 - protein, 563 aa, Arabidopsis thaliana; identical to SEQ ID NO: 26047
  peptide (1)..(563): Ceres Seq. ID no. 13608237

SEQ ID NO: 112837 - protein, 544 aa, Arabidopsis thaliana; identical to SEQ ID NO: 26048
  peptide (1)..(544): Ceres Seq. ID no. 13608238

SEQ ID NO: 112838 - protein, 536 aa, Arabidopsis thaliana; identical to SEQ ID NO: 26049
  peptide (1)..(536): Ceres Seq. ID no. 13608239

SEQ ID NO: 112839 - DNA, 1019 bp, Arabidopsis thaliana; identical to SEQ ID NO: 101600
  misc_feature (1)..(1019): Ceres Seq. ID no. 13608248
  misc_feature (1)..(1019): Ortholog of  Ceres SEQ ID NO 13595782 as cited in SEQ ID NO 57677
  misc_feature (1)..(1019): Ortholog of  Ceres SEQ ID NO 13596009 as cited in SEQ ID NO 68258

SEQ ID NO: 112840 - protein, 171 aa, Arabidopsis thaliana; identical to SEQ ID NO: 30222
  peptide (1)..(171): Ceres Seq. ID no. 13608249

SEQ ID NO: 112841 - protein, 166 aa, Arabidopsis thaliana; identical to SEQ ID NO: 30223
  peptide (1)..(166): Ceres Seq. ID no. 13608250

SEQ ID NO: 112842 - protein, 120 aa, Arabidopsis thaliana; identical to SEQ ID NO: 30224
  peptide (1)..(120): Ceres Seq. ID no. 13608251

SEQ ID NO: 112843 - DNA, 1879 bp, Arabidopsis thaliana; identical to SEQ ID NO: 101604
  misc_feature (1)..(1879): Ceres Seq. ID no. 13608252
  misc_feature (1)..(1879): Ortholog of  Ceres SEQ ID NO 14314363 as cited in SEQ ID NO 52272

SEQ ID NO: 112844 - protein, 417 aa, Arabidopsis thaliana; identical to SEQ ID NO: 101605
  peptide (1)..(417): Ceres Seq. ID no. 13608253

SEQ ID NO: 112845 - protein, 393 aa, Arabidopsis thaliana; identical to SEQ ID NO: 101606
  peptide (1)..(393): Ceres Seq. ID no. 13608254

SEQ ID NO: 112846 - protein, 348 aa, Arabidopsis thaliana; identical to SEQ ID NO: 101607
  peptide (1)..(348): Ceres Seq. ID no. 13608255

SEQ ID NO: 112847 - DNA, 3716 bp, Arabidopsis thaliana; identical to SEQ ID NO: 101608
  misc_feature (1)..(3716): Ceres Seq. ID no. 13608262
  misc_feature (1)..(3716): Ortholog of  Ceres SEQ ID NO 13595870 as cited in SEQ ID NO 62101
  misc_feature (1)..(3716): Ortholog of  Ceres SEQ ID NO 13590241 as cited in SEQ ID NO 63878
  misc_feature (1)..(3716): Ortholog of  Ceres SEQ ID NO 13657939 as cited in SEQ ID NO 66349

SEQ ID NO: 112848 - protein, 1130 aa, Arabidopsis thaliana; identical to SEQ ID NO: 101609
  peptide (1)..(1130): Ceres Seq. ID no. 13608263

SEQ ID NO: 112849 - protein, 1117 aa, Arabidopsis thaliana; identical to SEQ ID NO: 101610
  peptide (1)..(1117): Ceres Seq. ID no. 13608264

SEQ ID NO: 112850 - protein, 987 aa, Arabidopsis thaliana; identical to SEQ ID NO: 101611
  peptide (1)..(987): Ceres Seq. ID no. 13608265

SEQ ID NO: 112851 - DNA, 1709 bp, Arabidopsis thaliana; identical to SEQ ID NO: 101612
  misc_feature (1)..(1709): Ceres Seq. ID no. 13608276
  misc_feature (1)..(1709): Ortholog of  Ceres SEQ ID NO 14315241 as cited in SEQ ID NO 52516
  misc_feature (1)..(1709): Ortholog of  Ceres SEQ ID NO 13594349 as cited in SEQ ID NO 58161
  misc_feature (1)..(1709): Ortholog of  Ceres SEQ ID NO 13663419 as cited in SEQ ID NO 66561

SEQ ID NO: 112852 - protein, 502 aa, Arabidopsis thaliana; identical to SEQ ID NO: 101613
  peptide (1)..(502): Ceres Seq. ID no. 13608277

SEQ ID NO: 112853 - protein, 452 aa, Arabidopsis thaliana; identical to SEQ ID NO: 101614
  peptide (1)..(452): Ceres Seq. ID no. 13608278

SEQ ID NO: 112854 - DNA, 1359 bp, Arabidopsis thaliana; identical to SEQ ID NO: 101615
  misc_feature (1)..(1359): Ceres Seq. ID no. 13608287
  misc_feature (1)..(1359): Ortholog of  Ceres SEQ ID NO 14308787 as cited in SEQ ID NO 55614
  misc_feature (1)..(1359): Ortholog of  Ceres SEQ ID NO 13656547 as cited in SEQ ID NO 65935

SEQ ID NO: 112855 - protein, 392 aa, Arabidopsis thaliana; identical to SEQ ID NO: 101616
  peptide (1)..(392): Ceres Seq. ID no. 13608288

SEQ ID NO: 112856 - protein, 385 aa, Arabidopsis thaliana; identical to SEQ ID NO: 35194
  peptide (1)..(385): Ceres Seq. ID no. 13608289

SEQ ID NO: 112857 - protein, 313 aa, Arabidopsis thaliana; identical to SEQ ID NO: 35195
  peptide (1)..(313): Ceres Seq. ID no. 13608290

SEQ ID NO: 112858 - DNA, 712 bp, Arabidopsis thaliana; identical to SEQ ID NO: 101619
  misc_feature (1)..(712): Ceres Seq. ID no. 13608302
  misc_feature (1)..(712): Ortholog of  Ceres SEQ ID NO 13594979 as cited in SEQ ID NO 56172
  misc_feature (1)..(712): Ortholog of  Ceres SEQ ID NO 14316530 as cited in SEQ ID NO 60270

SEQ ID NO: 112859 - protein, 144 aa, Arabidopsis thaliana; identical to SEQ ID NO: 101620
  peptide (1)..(144): Ceres Seq. ID no. 13608303

SEQ ID NO: 112860 - protein, 135 aa, Arabidopsis thaliana; identical to SEQ ID NO: 21178
  peptide (1)..(135): Ceres Seq. ID no. 13608304

SEQ ID NO: 112861 - DNA, 1302 bp, Arabidopsis thaliana; identical to SEQ ID NO: 101622
  misc_feature (1)..(1302): Ceres Seq. ID no. 13608305
  misc_feature (1)..(1302): Ortholog of  Ceres SEQ ID NO 14308168 as cited in SEQ ID NO 59069

SEQ ID NO: 112862 - protein, 364 aa, Arabidopsis thaliana; identical to SEQ ID NO: 101623
  peptide (1)..(364): Ceres Seq. ID no. 13608306

SEQ ID NO: 112863 - protein, 343 aa, Arabidopsis thaliana; identical to SEQ ID NO: 35833
  peptide (1)..(343): Ceres Seq. ID no. 13608307

SEQ ID NO: 112864 - protein, 329 aa, Arabidopsis thaliana; identical to SEQ ID NO: 35834
  peptide (1)..(329): Ceres Seq. ID no. 13608308

SEQ ID NO: 112865 - DNA, 953 bp, Arabidopsis thaliana; identical to SEQ ID NO: 101626
  misc_feature (1)..(953): Ceres Seq. ID no. 13608313
  misc_feature (1)..(953): Ortholog of  Ceres SEQ ID NO 13638567 as cited in SEQ ID NO 51303
  misc_feature (1)..(953): Ortholog of  Ceres SEQ ID NO 12610031 as cited in SEQ ID NO 55811
  misc_feature (1)..(953): Ortholog of  Ceres SEQ ID NO 12610896 as cited in SEQ ID NO 55861
  misc_feature (1)..(953): Ortholog of  Ceres SEQ ID NO 12619664 as cited in SEQ ID NO 66048
  misc_feature (1)..(953): Ortholog of  Ceres SEQ ID NO 12635952 as cited in SEQ ID NO 0

SEQ ID NO: 112866 - protein, 212 aa, Arabidopsis thaliana; identical to SEQ ID NO: 20959
  peptide (1)..(212): Ceres Seq. ID no. 13608314

SEQ ID NO: 112867 - protein, 113 aa, Arabidopsis thaliana; identical to SEQ ID NO: 20960
  peptide (1)..(113): Ceres Seq. ID no. 13608315

SEQ ID NO: 112868 - protein, 109 aa, Arabidopsis thaliana; identical to SEQ ID NO: 20961
  peptide (1)..(109): Ceres Seq. ID no. 13608316

SEQ ID NO: 112869 - DNA, 1154 bp, Arabidopsis thaliana; identical to SEQ ID NO: 101630
  misc_feature (1)..(1154): Ceres Seq. ID no. 13608324
  misc_feature (1)..(1154): Ortholog of  Ceres SEQ ID NO 12582036 as cited in SEQ ID NO 50981
  misc_feature (1)..(1154): Ortholog of  Ceres SEQ ID NO 14311969 as cited in SEQ ID NO 58929
  misc_feature (1)..(1154): Ortholog of  Ceres SEQ ID NO 15173523 as cited in SEQ ID NO 61797
  misc_feature (1)..(1154): Ortholog of  Ceres SEQ ID NO 14309357 as cited in SEQ ID NO 0

SEQ ID NO: 112870 - protein, 267 aa, Arabidopsis thaliana; identical to SEQ ID NO: 39219
  peptide (1)..(267): Ceres Seq. ID no. 13608325

SEQ ID NO: 112871 - protein, 238 aa, Arabidopsis thaliana; identical to SEQ ID NO: 39220
  peptide (1)..(238): Ceres Seq. ID no. 13608326

SEQ ID NO: 112872 - protein, 234 aa, Arabidopsis thaliana; identical to SEQ ID NO: 39221
  peptide (1)..(234): Ceres Seq. ID no. 13608327

SEQ ID NO: 112873 - DNA, 825 bp, Arabidopsis thaliana; identical to SEQ ID NO: 101634
  misc_feature (1)..(825): Ceres Seq. ID no. 13608328
  misc_feature (1)..(825): Ortholog of  Ceres SEQ ID NO 12780822 as cited in SEQ ID NO 67471

SEQ ID NO: 112874 - protein, 231 aa, Arabidopsis thaliana; identical to SEQ ID NO: 101635
  peptide (1)..(231): Ceres Seq. ID no. 13608329

SEQ ID NO: 112875 - protein, 155 aa, Arabidopsis thaliana; identical to SEQ ID NO: 101636
  peptide (1)..(155): Ceres Seq. ID no. 13608330

SEQ ID NO: 112876 - protein, 145 aa, Arabidopsis thaliana; identical to SEQ ID NO: 101637
  peptide (1)..(145): Ceres Seq. ID no. 13608331

SEQ ID NO: 112877 - DNA, 3082 bp, Arabidopsis thaliana; identical to SEQ ID NO: 101638
  misc_feature (1)..(3082): Ceres Seq. ID no. 13608348
  misc_feature (1)..(3082): Ortholog of  Ceres SEQ ID NO 13532807 as cited in SEQ ID NO 53012
  misc_feature (1)..(3082): Ortholog of  Ceres SEQ ID NO 13663060 as cited in SEQ ID NO 60964
  misc_feature (1)..(3082): Ortholog of  Ceres SEQ ID NO 13598532 as cited in SEQ ID NO 65204
  misc_feature (1)..(3082): Ortholog of  Ceres SEQ ID NO 13656849 as cited in SEQ ID NO 65764
  misc_feature (1)..(3082): Ortholog of  Ceres SEQ ID NO 13500573 as cited in SEQ ID NO 67431
  misc_feature (1)..(3082): Ortholog of  Ceres SEQ ID NO 13656501 as cited in SEQ ID NO 69206

SEQ ID NO: 112878 - protein, 612 aa, Arabidopsis thaliana; identical to SEQ ID NO: 39029
  peptide (1)..(612): Ceres Seq. ID no. 13608349

SEQ ID NO: 112879 - protein, 478 aa, Arabidopsis thaliana; identical to SEQ ID NO: 39030
  peptide (1)..(478): Ceres Seq. ID no. 13608350

SEQ ID NO: 112880 - protein, 441 aa, Arabidopsis thaliana; identical to SEQ ID NO: 39031
  peptide (1)..(441): Ceres Seq. ID no. 13608351

SEQ ID NO: 112881 - DNA, 1503 bp, Arabidopsis thaliana; identical to SEQ ID NO: 101642
  misc_feature (1)..(1503): Ceres Seq. ID no. 13608352
  misc_feature (1)..(1503): Ortholog of  Ceres SEQ ID NO 15226223 as cited in SEQ ID NO 65500

SEQ ID NO: 112882 - protein, 413 aa, Arabidopsis thaliana; identical to SEQ ID NO: 101643
  peptide (1)..(413): Ceres Seq. ID no. 13608353

SEQ ID NO: 112883 - protein, 388 aa, Arabidopsis thaliana; identical to SEQ ID NO: 101644
  peptide (1)..(388): Ceres Seq. ID no. 13608354

SEQ ID NO: 112884 - protein, 279 aa, Arabidopsis thaliana; identical to SEQ ID NO: 101645
  peptide (1)..(279): Ceres Seq. ID no. 13608355

SEQ ID NO: 112885 - DNA, 1609 bp, Arabidopsis thaliana; identical to SEQ ID NO: 101646
  misc_feature (1)..(1609): Ceres Seq. ID no. 13608356
  misc_feature (1)..(1609): Ortholog of  Ceres SEQ ID NO 12627133 as cited in SEQ ID NO 68031

SEQ ID NO: 112886 - protein, 452 aa, Arabidopsis thaliana; identical to SEQ ID NO: 25238
  peptide (1)..(452): Ceres Seq. ID no. 13608357

SEQ ID NO: 112887 - protein, 435 aa, Arabidopsis thaliana; identical to SEQ ID NO: 25239
  peptide (1)..(435): Ceres Seq. ID no. 13608358

SEQ ID NO: 112888 - protein, 370 aa, Arabidopsis thaliana; identical to SEQ ID NO: 25240
  peptide (1)..(370): Ceres Seq. ID no. 13608359

SEQ ID NO: 112889 - DNA, 1466 bp, Arabidopsis thaliana; identical to SEQ ID NO: 101650
  misc_feature (1)..(1466): Ceres Seq. ID no. 13608387
  misc_feature (1)..(1466): Ortholog of  Ceres SEQ ID NO 14303263 as cited in SEQ ID NO 1224
  misc_feature (1)..(1466): Ortholog of  Ceres SEQ ID NO 13593955 as cited in SEQ ID NO 54278
  misc_feature (1)..(1466): Ortholog of  Ceres SEQ ID NO 13597380 as cited in SEQ ID NO 64054
  misc_feature (1)..(1466): Ortholog of  Ceres SEQ ID NO 12625474 as cited in SEQ ID NO 64169
  misc_feature (1)..(1466): Ortholog of  Ceres SEQ ID NO 13597502 as cited in SEQ ID NO 64681

SEQ ID NO: 112890 - protein, 402 aa, Arabidopsis thaliana; identical to SEQ ID NO: 101651
  peptide (1)..(402): Ceres Seq. ID no. 13608388

SEQ ID NO: 112891 - protein, 371 aa, Arabidopsis thaliana; identical to SEQ ID NO: 101652
  peptide (1)..(371): Ceres Seq. ID no. 13608389

SEQ ID NO: 112892 - protein, 295 aa, Arabidopsis thaliana; identical to SEQ ID NO: 101653
  peptide (1)..(295): Ceres Seq. ID no. 13608390

SEQ ID NO: 112893 - DNA, 1061 bp, Arabidopsis thaliana; identical to SEQ ID NO: 101654
  misc_feature (1)..(1061): Ceres Seq. ID no. 13608391
  misc_feature (1)..(1061): Ortholog of  Ceres SEQ ID NO 13597679 as cited in SEQ ID NO 65073

SEQ ID NO: 112894 - protein, 268 aa, Arabidopsis thaliana; identical to SEQ ID NO: 101655
  peptide (1)..(268): Ceres Seq. ID no. 13608392

SEQ ID NO: 112895 - protein, 250 aa, Arabidopsis thaliana; identical to SEQ ID NO: 101656
  peptide (1)..(250): Ceres Seq. ID no. 13608393

SEQ ID NO: 112896 - protein, 229 aa, Arabidopsis thaliana; identical to SEQ ID NO: 101657
  peptide (1)..(229): Ceres Seq. ID no. 13608394

SEQ ID NO: 112897 - DNA, 954 bp, Arabidopsis thaliana; identical to SEQ ID NO: 101658
  misc_feature (1)..(954): Ceres Seq. ID no. 13608399
  misc_feature (1)..(954): Ortholog of  Ceres SEQ ID NO 15170458 as cited in SEQ ID NO 52842
  misc_feature (1)..(954): Ortholog of  Ceres SEQ ID NO 13597679 as cited in SEQ ID NO 65073

SEQ ID NO: 112898 - protein, 271 aa, Arabidopsis thaliana; identical to SEQ ID NO: 26384
  peptide (1)..(271): Ceres Seq. ID no. 13608400

SEQ ID NO: 112899 - protein, 253 aa, Arabidopsis thaliana; identical to SEQ ID NO: 26385
  peptide (1)..(253): Ceres Seq. ID no. 13608401

SEQ ID NO: 112900 - protein, 186 aa, Arabidopsis thaliana; identical to SEQ ID NO: 26386
  peptide (1)..(186): Ceres Seq. ID no. 13608402

SEQ ID NO: 112901 - DNA, 872 bp, Arabidopsis thaliana; identical to SEQ ID NO: 101662
  misc_feature (1)..(872): Ceres Seq. ID no. 13608405
  misc_feature (1)..(872): Ortholog of  Ceres SEQ ID NO 14301396 as cited in SEQ ID NO 51789
  misc_feature (1)..(872): Ortholog of  Ceres SEQ ID NO 12610031 as cited in SEQ ID NO 55811
  misc_feature (1)..(872): Ortholog of  Ceres SEQ ID NO 12610896 as cited in SEQ ID NO 55861
  misc_feature (1)..(872): Ortholog of  Ceres SEQ ID NO 12619664 as cited in SEQ ID NO 66048
  misc_feature (1)..(872): Ortholog of  Ceres SEQ ID NO 12635952 as cited in SEQ ID NO 0

SEQ ID NO: 112902 - protein, 215 aa, Arabidopsis thaliana; identical to SEQ ID NO: 22480
  peptide (1)..(215): Ceres Seq. ID no. 13608406

SEQ ID NO: 112903 - protein, 181 aa, Arabidopsis thaliana; identical to SEQ ID NO: 22481
  peptide (1)..(181): Ceres Seq. ID no. 13608407

SEQ ID NO: 112904 - protein, 146 aa, Arabidopsis thaliana; identical to SEQ ID NO: 22482
  peptide (1)..(146): Ceres Seq. ID no. 13608408

SEQ ID NO: 112905 - DNA, 1624 bp, Arabidopsis thaliana; identical to SEQ ID NO: 101666
  misc_feature (1)..(1624): Ceres Seq. ID no. 13608409
  misc_feature (1)..(1624): Ortholog of  Ceres SEQ ID NO 13594209 as cited in SEQ ID NO 59089
  misc_feature (1)..(1624): Ortholog of  Ceres SEQ ID NO 14302228 as cited in SEQ ID NO 65061
  misc_feature (1)..(1624): Ortholog of  Ceres SEQ ID NO 14308027 as cited in SEQ ID NO 65826
  misc_feature (1)..(1624): Ortholog of  Ceres SEQ ID NO 15169631 as cited in SEQ ID NO 67173
  misc_feature (1)..(1624): Ortholog of  Ceres SEQ ID NO 12614124 as cited in SEQ ID NO 68392
  misc_feature (1)..(1624): Ortholog of  Ceres SEQ ID NO 15176087 as cited in SEQ ID NO 68692
  misc_feature (1)..(1624): Ortholog of  Ceres SEQ ID NO 14307980 as cited in SEQ ID NO 69214

SEQ ID NO: 112906 - protein, 511 aa, Arabidopsis thaliana; identical to SEQ ID NO: 101667
  peptide (1)..(511): Ceres Seq. ID no. 13608410

SEQ ID NO: 112907 - protein, 503 aa, Arabidopsis thaliana; identical to SEQ ID NO: 101668
  peptide (1)..(503): Ceres Seq. ID no. 13608411

SEQ ID NO: 112908 - protein, 497 aa, Arabidopsis thaliana; identical to SEQ ID NO: 96730
  peptide (1)..(497): Ceres Seq. ID no. 13608412

SEQ ID NO: 112909 - DNA, 953 bp, Arabidopsis thaliana; identical to SEQ ID NO: 101670
  misc_feature (1)..(953): Ceres Seq. ID no. 13608423
  misc_feature (1)..(953): Ortholog of  Ceres SEQ ID NO 14305591 as cited in SEQ ID NO 0

SEQ ID NO: 112910 - protein, 262 aa, Arabidopsis thaliana; identical to SEQ ID NO: 101671
  peptide (1)..(262): Ceres Seq. ID no. 13608424

SEQ ID NO: 112911 - protein, 138 aa, Arabidopsis thaliana; identical to SEQ ID NO: 101672
  peptide (1)..(138): Ceres Seq. ID no. 13608425

SEQ ID NO: 112912 - protein, 136 aa, Arabidopsis thaliana; identical to SEQ ID NO: 101673
  peptide (1)..(136): Ceres Seq. ID no. 13608426

SEQ ID NO: 112913 - DNA, 1234 bp, Arabidopsis thaliana; identical to SEQ ID NO: 101674
  misc_feature (1)..(1234): Ceres Seq. ID no. 13608438
  misc_feature (1)..(1234): Ortholog of  Ceres SEQ ID NO 13595351 as cited in SEQ ID NO 55934
  misc_feature (1)..(1234): Ortholog of  Ceres SEQ ID NO 13639645 as cited in SEQ ID NO 57488

SEQ ID NO: 112914 - protein, 374 aa, Arabidopsis thaliana; identical to SEQ ID NO: 101675
  peptide (1)..(374): Ceres Seq. ID no. 13608439

SEQ ID NO: 112915 - protein, 369 aa, Arabidopsis thaliana; identical to SEQ ID NO: 101676
  peptide (1)..(369): Ceres Seq. ID no. 13608440

SEQ ID NO: 112916 - protein, 356 aa, Arabidopsis thaliana; identical to SEQ ID NO: 23462
  peptide (1)..(356): Ceres Seq. ID no. 13608441

SEQ ID NO: 112917 - DNA, 1294 bp, Arabidopsis thaliana; identical to SEQ ID NO: 101678
  misc_feature (1)..(1294): Ceres Seq. ID no. 13608446
  misc_feature (1)..(1294): Ortholog of  Ceres SEQ ID NO 15172948 as cited in SEQ ID NO 51777
  misc_feature (1)..(1294): Ortholog of  Ceres SEQ ID NO 12784416 as cited in SEQ ID NO 61324

SEQ ID NO: 112918 - protein, 216 aa, Arabidopsis thaliana; identical to SEQ ID NO: 101679
  peptide (1)..(216): Ceres Seq. ID no. 13608447

SEQ ID NO: 112919 - protein, 187 aa, Arabidopsis thaliana; identical to SEQ ID NO: 101680
  peptide (1)..(187): Ceres Seq. ID no. 13608448

SEQ ID NO: 112920 - DNA, 2039 bp, Arabidopsis thaliana; identical to SEQ ID NO: 101681
  misc_feature (1)..(2039): Ceres Seq. ID no. 13608467
  misc_feature (1)..(2039): Ortholog of  Ceres SEQ ID NO 12566921 as cited in SEQ ID NO 0

SEQ ID NO: 112921 - protein, 574 aa, Arabidopsis thaliana; identical to SEQ ID NO: 101682
  peptide (1)..(574): Ceres Seq. ID no. 13608468

SEQ ID NO: 112922 - protein, 563 aa, Arabidopsis thaliana; identical to SEQ ID NO: 101683
  peptide (1)..(563): Ceres Seq. ID no. 13608469

SEQ ID NO: 112923 - protein, 445 aa, Arabidopsis thaliana; identical to SEQ ID NO: 101684
  peptide (1)..(445): Ceres Seq. ID no. 13608470

SEQ ID NO: 112924 - DNA, 2458 bp, Arabidopsis thaliana; identical to SEQ ID NO: 101685
  misc_feature (1)..(2458): Ceres Seq. ID no. 13608475
  misc_feature (1)..(2458): Ortholog of  Ceres SEQ ID NO 13600595 as cited in SEQ ID NO 629

SEQ ID NO: 112925 - protein, 718 aa, Arabidopsis thaliana; identical to SEQ ID NO: 39984
  peptide (1)..(718): Ceres Seq. ID no. 13608476

SEQ ID NO: 112926 - protein, 716 aa, Arabidopsis thaliana; identical to SEQ ID NO: 39985
  peptide (1)..(716): Ceres Seq. ID no. 13608477

SEQ ID NO: 112927 - protein, 657 aa, Arabidopsis thaliana; identical to SEQ ID NO: 39986
  peptide (1)..(657): Ceres Seq. ID no. 13608478

SEQ ID NO: 112928 - DNA, 1381 bp, Arabidopsis thaliana; identical to SEQ ID NO: 101689
  misc_feature (1)..(1381): Ceres Seq. ID no. 13608479
  misc_feature (1)..(1381): Ortholog of  Ceres SEQ ID NO 15178181 as cited in SEQ ID NO 58740
  misc_feature (1)..(1381): Ortholog of  Ceres SEQ ID NO 12614739 as cited in SEQ ID NO 68587

SEQ ID NO: 112929 - protein, 416 aa, Arabidopsis thaliana; identical to SEQ ID NO: 101690
  peptide (1)..(416): Ceres Seq. ID no. 13608480

SEQ ID NO: 112930 - protein, 407 aa, Arabidopsis thaliana; identical to SEQ ID NO: 101691
  peptide (1)..(407): Ceres Seq. ID no. 13608481

SEQ ID NO: 112931 - protein, 406 aa, Arabidopsis thaliana; identical to SEQ ID NO: 78394
  peptide (1)..(406): Ceres Seq. ID no. 13608482

SEQ ID NO: 112932 - DNA, 1387 bp, Arabidopsis thaliana; identical to SEQ ID NO: 101693
  misc_feature (1)..(1387): Ceres Seq. ID no. 13608483
  misc_feature (1)..(1387): Ortholog of  Ceres SEQ ID NO 14302154 as cited in SEQ ID NO 0

SEQ ID NO: 112933 - protein, 303 aa, Arabidopsis thaliana; identical to SEQ ID NO: 35347
  peptide (1)..(303): Ceres Seq. ID no. 13608484

SEQ ID NO: 112934 - DNA, 2758 bp, Arabidopsis thaliana; identical to SEQ ID NO: 101695
  misc_feature (1)..(2758): Ceres Seq. ID no. 13608493
  misc_feature (1)..(2758): Ortholog of  Ceres SEQ ID NO 13595870 as cited in SEQ ID NO 62101
  misc_feature (1)..(2758): Ortholog of  Ceres SEQ ID NO 13590241 as cited in SEQ ID NO 63878
  misc_feature (1)..(2758): Ortholog of  Ceres SEQ ID NO 13657939 as cited in SEQ ID NO 66349

SEQ ID NO: 112935 - protein, 855 aa, Arabidopsis thaliana; identical to SEQ ID NO: 101696
  peptide (1)..(855): Ceres Seq. ID no. 13608494

SEQ ID NO: 112936 - protein, 753 aa, Arabidopsis thaliana; identical to SEQ ID NO: 101697
  peptide (1)..(753): Ceres Seq. ID no. 13608495

SEQ ID NO: 112937 - protein, 736 aa, Arabidopsis thaliana; identical to SEQ ID NO: 101698
  peptide (1)..(736): Ceres Seq. ID no. 13608496

SEQ ID NO: 112938 - DNA, 1218 bp, Arabidopsis thaliana; identical to SEQ ID NO: 101699
  misc_feature (1)..(1218): Ceres Seq. ID no. 13608507
  misc_feature (1)..(1218): Ortholog of  Ceres SEQ ID NO 13595503 as cited in SEQ ID NO 56643

SEQ ID NO: 112939 - protein, 353 aa, Arabidopsis thaliana; identical to SEQ ID NO: 42219
  peptide (1)..(353): Ceres Seq. ID no. 13608508

SEQ ID NO: 112940 - protein, 325 aa, Arabidopsis thaliana; identical to SEQ ID NO: 21559
  peptide (1)..(325): Ceres Seq. ID no. 13608509

SEQ ID NO: 112941 - protein, 313 aa, Arabidopsis thaliana; identical to SEQ ID NO: 21560
  peptide (1)..(313): Ceres Seq. ID no. 13608510

SEQ ID NO: 112942 - DNA, 1841 bp, Arabidopsis thaliana; identical to SEQ ID NO: 101703
  misc_feature (1)..(1841): Ceres Seq. ID no. 13608521
  misc_feature (1)..(1841): Ortholog of  Ceres SEQ ID NO 14304867 as cited in SEQ ID NO 54375

SEQ ID NO: 112943 - protein, 338 aa, Arabidopsis thaliana; identical to SEQ ID NO: 101704
  peptide (1)..(338): Ceres Seq. ID no. 13608522

SEQ ID NO: 112944 - protein, 287 aa, Arabidopsis thaliana; identical to SEQ ID NO: 101705
  peptide (1)..(287): Ceres Seq. ID no. 13608523

SEQ ID NO: 112945 - protein, 280 aa, Arabidopsis thaliana; identical to SEQ ID NO: 101706
  peptide (1)..(280): Ceres Seq. ID no. 13608524

SEQ ID NO: 112946 - DNA, 1900 bp, Arabidopsis thaliana; identical to SEQ ID NO: 101707
  misc_feature (1)..(1900): Ceres Seq. ID no. 13608525
  misc_feature (1)..(1900): Ortholog of  Ceres SEQ ID NO 14304867 as cited in SEQ ID NO 54375

SEQ ID NO: 112947 - protein, 477 aa, Arabidopsis thaliana; identical to SEQ ID NO: 41662
  peptide (1)..(477): Ceres Seq. ID no. 13608526

SEQ ID NO: 112948 - protein, 470 aa, Arabidopsis thaliana; identical to SEQ ID NO: 41663
  peptide (1)..(470): Ceres Seq. ID no. 13608527

SEQ ID NO: 112949 - protein, 399 aa, Arabidopsis thaliana; identical to SEQ ID NO: 41664
  peptide (1)..(399): Ceres Seq. ID no. 13608528

SEQ ID NO: 112950 - DNA, 1369 bp, Arabidopsis thaliana; identical to SEQ ID NO: 101711
  misc_feature (1)..(1369): Ceres Seq. ID no. 13608532
  misc_feature (1)..(1369): Ortholog of  Ceres SEQ ID NO 12782785 as cited in SEQ ID NO 0

SEQ ID NO: 112951 - protein, 352 aa, Arabidopsis thaliana; identical to SEQ ID NO: 43663
  peptide (1)..(352): Ceres Seq. ID no. 13608533

SEQ ID NO: 112952 - protein, 347 aa, Arabidopsis thaliana; identical to SEQ ID NO: 35320
  peptide (1)..(347): Ceres Seq. ID no. 13608534

SEQ ID NO: 112953 - protein, 269 aa, Arabidopsis thaliana; identical to SEQ ID NO: 35321
  peptide (1)..(269): Ceres Seq. ID no. 13608535

SEQ ID NO: 112954 - DNA, 897 bp, Arabidopsis thaliana; identical to SEQ ID NO: 101715
  misc_feature (1)..(897): Ceres Seq. ID no. 13608540
  misc_feature (1)..(897): Ortholog of  Ceres SEQ ID NO 15172991 as cited in SEQ ID NO 51333
  misc_feature (1)..(897): Ortholog of  Ceres SEQ ID NO 13594870 as cited in SEQ ID NO 51929
  misc_feature (1)..(897): Ortholog of  Ceres SEQ ID NO 12610679 as cited in SEQ ID NO 56077
  misc_feature (1)..(897): Ortholog of  Ceres SEQ ID NO 12635481 as cited in SEQ ID NO 0

SEQ ID NO: 112955 - protein, 144 aa, Arabidopsis thaliana; identical to SEQ ID NO: 28717
  peptide (1)..(144): Ceres Seq. ID no. 13608541

SEQ ID NO: 112956 - protein, 96 aa, Arabidopsis thaliana; identical to SEQ ID NO: 28718
  peptide (1)..(96): Ceres Seq. ID no. 13608542

SEQ ID NO: 112957 - protein, 79 aa, Arabidopsis thaliana; identical to SEQ ID NO: 28719
  peptide (1)..(79): Ceres Seq. ID no. 13608543

SEQ ID NO: 112958 - DNA, 821 bp, Arabidopsis thaliana; identical to SEQ ID NO: 101719
  misc_feature (1)..(821): Ceres Seq. ID no. 13608544
  misc_feature (1)..(821): Ortholog of  Ceres SEQ ID NO 15172991 as cited in SEQ ID NO 51333
  misc_feature (1)..(821): Ortholog of  Ceres SEQ ID NO 13594870 as cited in SEQ ID NO 51929
  misc_feature (1)..(821): Ortholog of  Ceres SEQ ID NO 12610679 as cited in SEQ ID NO 56077
  misc_feature (1)..(821): Ortholog of  Ceres SEQ ID NO 12635481 as cited in SEQ ID NO 0

SEQ ID NO: 112959 - protein, 141 aa, Arabidopsis thaliana; identical to SEQ ID NO: 28781
  peptide (1)..(141): Ceres Seq. ID no. 13608545

SEQ ID NO: 112960 - protein, 96 aa, Arabidopsis thaliana; identical to SEQ ID NO: 28782
  peptide (1)..(96): Ceres Seq. ID no. 13608546

SEQ ID NO: 112961 - DNA, 1384 bp, Arabidopsis thaliana; identical to SEQ ID NO: 101722
  misc_feature (1)..(1384): Ceres Seq. ID no. 13608558
  misc_feature (1)..(1384): Ortholog of  Ceres SEQ ID NO 14310639 as cited in SEQ ID NO 53858
  misc_feature (1)..(1384): Ortholog of  Ceres SEQ ID NO 14312851 as cited in SEQ ID NO 58364

SEQ ID NO: 112962 - protein, 334 aa, Arabidopsis thaliana; identical to SEQ ID NO: 101723
  peptide (1)..(334): Ceres Seq. ID no. 13608559

SEQ ID NO: 112963 - protein, 285 aa, Arabidopsis thaliana; identical to SEQ ID NO: 101724
  peptide (1)..(285): Ceres Seq. ID no. 13608560

SEQ ID NO: 112964 - protein, 198 aa, Arabidopsis thaliana; identical to SEQ ID NO: 22421
  peptide (1)..(198): Ceres Seq. ID no. 13608561

SEQ ID NO: 112965 - DNA, 537 bp, Arabidopsis thaliana; identical to SEQ ID NO: 101726
  misc_feature (1)..(537): Ceres Seq. ID no. 13608566
  misc_feature (1)..(537): Ortholog of  Ceres SEQ ID NO 15179080 as cited in SEQ ID NO 0

SEQ ID NO: 112966 - protein, 99 aa, Arabidopsis thaliana; identical to SEQ ID NO: 24405
  peptide (1)..(99): Ceres Seq. ID no. 13608567

SEQ ID NO: 112967 - protein, 91 aa, Arabidopsis thaliana; identical to SEQ ID NO: 101728
  peptide (1)..(91): Ceres Seq. ID no. 13608568

SEQ ID NO: 112968 - protein, 71 aa, Arabidopsis thaliana; identical to SEQ ID NO: 24406
  peptide (1)..(71): Ceres Seq. ID no. 13608569

SEQ ID NO: 112969 - DNA, 1109 bp, Arabidopsis thaliana; identical to SEQ ID NO: 101730
  misc_feature (1)..(1109): Ceres Seq. ID no. 13608577
  misc_feature (1)..(1109): Ortholog of  Ceres SEQ ID NO 14315662 as cited in SEQ ID NO 53109
  misc_feature (1)..(1109): Ortholog of  Ceres SEQ ID NO 12620168 as cited in SEQ ID NO 66161

SEQ ID NO: 112970 - protein, 325 aa, Arabidopsis thaliana; identical to SEQ ID NO: 101731
  peptide (1)..(325): Ceres Seq. ID no. 13608578

SEQ ID NO: 112971 - protein, 296 aa, Arabidopsis thaliana; identical to SEQ ID NO: 101732
  peptide (1)..(296): Ceres Seq. ID no. 13608579

SEQ ID NO: 112972 - protein, 291 aa, Arabidopsis thaliana; identical to SEQ ID NO: 101733
  peptide (1)..(291): Ceres Seq. ID no. 13608580

SEQ ID NO: 112973 - DNA, 1369 bp, Arabidopsis thaliana; identical to SEQ ID NO: 101734
  misc_feature (1)..(1369): Ceres Seq. ID no. 13608585
  misc_feature (1)..(1369): Ortholog of  Ceres SEQ ID NO 14311596 as cited in SEQ ID NO 51728
  misc_feature (1)..(1369): Ortholog of  Ceres SEQ ID NO 14307004 as cited in SEQ ID NO 59551
  misc_feature (1)..(1369): Ortholog of  Ceres SEQ ID NO 13661504 as cited in SEQ ID NO 61294
  misc_feature (1)..(1369): Ortholog of  Ceres SEQ ID NO 12617197 as cited in SEQ ID NO 63406
  misc_feature (1)..(1369): Ortholog of  Ceres SEQ ID NO 13597804 as cited in SEQ ID NO 64182
  misc_feature (1)..(1369): Ortholog of  Ceres SEQ ID NO 14302768 as cited in SEQ ID NO 64889
  misc_feature (1)..(1369): Ortholog of  Ceres SEQ ID NO 13598565 as cited in SEQ ID NO 65250
  misc_feature (1)..(1369): Ortholog of  Ceres SEQ ID NO 13598597 as cited in SEQ ID NO 65496
  misc_feature (1)..(1369): Ortholog of  Ceres SEQ ID NO 13596284 as cited in SEQ ID NO 68273
  misc_feature (1)..(1369): Ortholog of  Ceres SEQ ID NO 13596227 as cited in SEQ ID NO 68750
  misc_feature (1)..(1369): Ortholog of  Ceres SEQ ID NO 14308995 as cited in SEQ ID NO 0

SEQ ID NO: 112974 - protein, 377 aa, Arabidopsis thaliana; identical to SEQ ID NO: 101735
  peptide (1)..(377): Ceres Seq. ID no. 13608586

SEQ ID NO: 112975 - protein, 344 aa, Arabidopsis thaliana; identical to SEQ ID NO: 22657
  peptide (1)..(344): Ceres Seq. ID no. 13608587

SEQ ID NO: 112976 - protein, 246 aa, Arabidopsis thaliana; identical to SEQ ID NO: 22658
  peptide (1)..(246): Ceres Seq. ID no. 13608588

SEQ ID NO: 112977 - DNA, 835 bp, Arabidopsis thaliana; identical to SEQ ID NO: 101738
  misc_feature (1)..(835): Ceres Seq. ID no. 13608589
  misc_feature (1)..(835): Ortholog of  Ceres SEQ ID NO 12610267 as cited in SEQ ID NO 51993
  misc_feature (1)..(835): Ortholog of  Ceres SEQ ID NO 13495070 as cited in SEQ ID NO 53216
  misc_feature (1)..(835): Ortholog of  Ceres SEQ ID NO 12598241 as cited in SEQ ID NO 61025
  misc_feature (1)..(835): Ortholog of  Ceres SEQ ID NO 13661333 as cited in SEQ ID NO 61620
  misc_feature (1)..(835): Ortholog of  Ceres SEQ ID NO 13596812 as cited in SEQ ID NO 62283
  misc_feature (1)..(835): Ortholog of  Ceres SEQ ID NO 13623021 as cited in SEQ ID NO 0
  misc_feature (1)..(835): Ortholog of  Ceres SEQ ID NO 14302179 as cited in SEQ ID NO 0
  misc_feature (1)..(835): Ortholog of  Ceres SEQ ID NO 14309080 as cited in SEQ ID NO 0

SEQ ID NO: 112978 - protein, 139 aa, Arabidopsis thaliana; identical to SEQ ID NO: 26126
  peptide (1)..(139): Ceres Seq. ID no. 13608590

SEQ ID NO: 112979 - protein, 132 aa, Arabidopsis thaliana; identical to SEQ ID NO: 26127
  peptide (1)..(132): Ceres Seq. ID no. 13608591

SEQ ID NO: 112980 - DNA, 1395 bp, Arabidopsis thaliana; identical to SEQ ID NO: 101741
  misc_feature (1)..(1395): Ceres Seq. ID no. 13608592
  misc_feature (1)..(1395): Ortholog of  Ceres SEQ ID NO 13596433 as cited in SEQ ID NO 68721
  misc_feature (1)..(1395): Ortholog of  Ceres SEQ ID NO 13599169 as cited in SEQ ID NO 0

SEQ ID NO: 112981 - protein, 341 aa, Arabidopsis thaliana; identical to SEQ ID NO: 21850
  peptide (1)..(341): Ceres Seq. ID no. 13608593

SEQ ID NO: 112982 - protein, 313 aa, Arabidopsis thaliana; identical to SEQ ID NO: 21851
  peptide (1)..(313): Ceres Seq. ID no. 13608594

SEQ ID NO: 112983 - protein, 293 aa, Arabidopsis thaliana; identical to SEQ ID NO: 21852
  peptide (1)..(293): Ceres Seq. ID no. 13608595

SEQ ID NO: 112984 - DNA, 1222 bp, Arabidopsis thaliana; identical to SEQ ID NO: 101745
  misc_feature (1)..(1222): Ceres Seq. ID no. 13608601
  misc_feature (1)..(1222): Ortholog of  Ceres SEQ ID NO 14314534 as cited in SEQ ID NO 52434
  misc_feature (1)..(1222): Ortholog of  Ceres SEQ ID NO 12619999 as cited in SEQ ID NO 66123
  misc_feature (1)..(1222): Ortholog of  Ceres SEQ ID NO 13656436 as cited in SEQ ID NO 69154

SEQ ID NO: 112985 - protein, 217 aa, Arabidopsis thaliana; identical to SEQ ID NO: 23142
  peptide (1)..(217): Ceres Seq. ID no. 13608602

SEQ ID NO: 112986 - DNA, 2064 bp, Arabidopsis thaliana; identical to SEQ ID NO: 101747
  misc_feature (1)..(2064): Ceres Seq. ID no. 13608603
  misc_feature (1)..(2064): Ortholog of  Ceres SEQ ID NO 13594317 as cited in SEQ ID NO 57796

SEQ ID NO: 112987 - protein, 590 aa, Arabidopsis thaliana; identical to SEQ ID NO: 101748
  peptide (1)..(590): Ceres Seq. ID no. 13608604

SEQ ID NO: 112988 - protein, 581 aa, Arabidopsis thaliana; identical to SEQ ID NO: 101749
  peptide (1)..(581): Ceres Seq. ID no. 13608605

SEQ ID NO: 112989 - protein, 533 aa, Arabidopsis thaliana; identical to SEQ ID NO: 101750
  peptide (1)..(533): Ceres Seq. ID no. 13608606

SEQ ID NO: 112990 - DNA, 2167 bp, Arabidopsis thaliana; identical to SEQ ID NO: 101751
  misc_feature (1)..(2167): Ceres Seq. ID no. 13608611
  misc_feature (1)..(2167): Ortholog of  Ceres SEQ ID NO 14313670 as cited in SEQ ID NO 54491

SEQ ID NO: 112991 - protein, 584 aa, Arabidopsis thaliana; identical to SEQ ID NO: 35014
  peptide (1)..(584): Ceres Seq. ID no. 13608612

SEQ ID NO: 112992 - protein, 469 aa, Arabidopsis thaliana; identical to SEQ ID NO: 35015
  peptide (1)..(469): Ceres Seq. ID no. 13608613

SEQ ID NO: 112993 - protein, 451 aa, Arabidopsis thaliana; identical to SEQ ID NO: 35016
  peptide (1)..(451): Ceres Seq. ID no. 13608614

SEQ ID NO: 112994 - DNA, 1266 bp, Arabidopsis thaliana; identical to SEQ ID NO: 101755
  misc_feature (1)..(1266): Ceres Seq. ID no. 13608615
  misc_feature (1)..(1266): Ortholog of  Ceres SEQ ID NO 14303417 as cited in SEQ ID NO 54923
  misc_feature (1)..(1266): Ortholog of  Ceres SEQ ID NO 15169084 as cited in SEQ ID NO 59115
  misc_feature (1)..(1266): Ortholog of  Ceres SEQ ID NO 12635513 as cited in SEQ ID NO 0
  misc_feature (1)..(1266): Ortholog of  Ceres SEQ ID NO 15179044 as cited in SEQ ID NO 0

SEQ ID NO: 112995 - protein, 251 aa, Arabidopsis thaliana; identical to SEQ ID NO: 26326
  peptide (1)..(251): Ceres Seq. ID no. 13608616

SEQ ID NO: 112996 - protein, 148 aa, Arabidopsis thaliana; identical to SEQ ID NO: 26327
  peptide (1)..(148): Ceres Seq. ID no. 13608617

SEQ ID NO: 112997 - protein, 142 aa, Arabidopsis thaliana; identical to SEQ ID NO: 26328
  peptide (1)..(142): Ceres Seq. ID no. 13608618

SEQ ID NO: 112998 - DNA, 1733 bp, Arabidopsis thaliana; identical to SEQ ID NO: 101759
  misc_feature (1)..(1733): Ceres Seq. ID no. 13608624
  misc_feature (1)..(1733): Ortholog of  Ceres SEQ ID NO 15170811 as cited in SEQ ID NO 52649
  misc_feature (1)..(1733): Ortholog of  Ceres SEQ ID NO 13638331 as cited in SEQ ID NO 58047
  misc_feature (1)..(1733): Ortholog of  Ceres SEQ ID NO 15225845 as cited in SEQ ID NO 65125

SEQ ID NO: 112999 - protein, 503 aa, Arabidopsis thaliana; identical to SEQ ID NO: 24564
  peptide (1)..(503): Ceres Seq. ID no. 13608625

SEQ ID NO: 113000 - protein, 393 aa, Arabidopsis thaliana; identical to SEQ ID NO: 24565
  peptide (1)..(393): Ceres Seq. ID no. 13608626

SEQ ID NO: 113001 - protein, 364 aa, Arabidopsis thaliana; identical to SEQ ID NO: 24566
  peptide (1)..(364): Ceres Seq. ID no. 13608627

SEQ ID NO: 113002 - DNA, 883 bp, Arabidopsis thaliana; identical to SEQ ID NO: 101763
  misc_feature (1)..(883): Ceres Seq. ID no. 13608636
  misc_feature (1)..(883): Ortholog of  Ceres SEQ ID NO 12557831 as cited in SEQ ID NO 58
  misc_feature (1)..(883): Ortholog of  Ceres SEQ ID NO 13638808 as cited in SEQ ID NO 51951
  misc_feature (1)..(883): Ortholog of  Ceres SEQ ID NO 12637454 as cited in SEQ ID NO 0

SEQ ID NO: 113003 - protein, 167 aa, Arabidopsis thaliana; identical to SEQ ID NO: 35878
  peptide (1)..(167): Ceres Seq. ID no. 13608637

SEQ ID NO: 113004 - protein, 125 aa, Arabidopsis thaliana; identical to SEQ ID NO: 35879
  peptide (1)..(125): Ceres Seq. ID no. 13608638

SEQ ID NO: 113005 - protein, 109 aa, Arabidopsis thaliana; identical to SEQ ID NO: 35880
  peptide (1)..(109): Ceres Seq. ID no. 13608639

SEQ ID NO: 113006 - DNA, 1101 bp, Arabidopsis thaliana; identical to SEQ ID NO: 101767
  misc_feature (1)..(1101): Ceres Seq. ID no. 13608640
  misc_feature (1)..(1101): Ortholog of  Ceres SEQ ID NO 13660172 as cited in SEQ ID NO 67576

SEQ ID NO: 113007 - protein, 262 aa, Arabidopsis thaliana; identical to SEQ ID NO: 35092
  peptide (1)..(262): Ceres Seq. ID no. 13608641

SEQ ID NO: 113008 - protein, 155 aa, Arabidopsis thaliana; identical to SEQ ID NO: 35093
  peptide (1)..(155): Ceres Seq. ID no. 13608642

SEQ ID NO: 113009 - protein, 140 aa, Arabidopsis thaliana; identical to SEQ ID NO: 35094
  peptide (1)..(140): Ceres Seq. ID no. 13608643

SEQ ID NO: 113010 - DNA, 1208 bp, Arabidopsis thaliana; identical to SEQ ID NO: 101771
  misc_feature (1)..(1208): Ceres Seq. ID no. 13608673
  misc_feature (1)..(1208): Ortholog of  Ceres SEQ ID NO 15171739 as cited in SEQ ID NO 57134

SEQ ID NO: 113011 - protein, 363 aa, Arabidopsis thaliana; identical to SEQ ID NO: 101772
  peptide (1)..(363): Ceres Seq. ID no. 13608674

SEQ ID NO: 113012 - protein, 357 aa, Arabidopsis thaliana; identical to SEQ ID NO: 101773
  peptide (1)..(357): Ceres Seq. ID no. 13608675

SEQ ID NO: 113013 - protein, 348 aa, Arabidopsis thaliana; identical to SEQ ID NO: 101774
  peptide (1)..(348): Ceres Seq. ID no. 13608676

SEQ ID NO: 113014 - DNA, 1162 bp, Arabidopsis thaliana; identical to SEQ ID NO: 101775
  misc_feature (1)..(1162): Ceres Seq. ID no. 13608677
  misc_feature (1)..(1162): Ortholog of  Ceres SEQ ID NO 14309202 as cited in SEQ ID NO 0

SEQ ID NO: 113015 - protein, 314 aa, Arabidopsis thaliana; identical to SEQ ID NO: 101776
  peptide (1)..(314): Ceres Seq. ID no. 13608678

SEQ ID NO: 113016 - protein, 307 aa, Arabidopsis thaliana; identical to SEQ ID NO: 101777
  peptide (1)..(307): Ceres Seq. ID no. 13608679

SEQ ID NO: 113017 - protein, 241 aa, Arabidopsis thaliana; identical to SEQ ID NO: 101778
  peptide (1)..(241): Ceres Seq. ID no. 13608680

SEQ ID NO: 113018 - DNA, 1364 bp, Arabidopsis thaliana; identical to SEQ ID NO: 101779
  misc_feature (1)..(1364): Ceres Seq. ID no. 13608681
  misc_feature (1)..(1364): Ortholog of  Ceres SEQ ID NO 13659033 as cited in SEQ ID NO 66372
  misc_feature (1)..(1364): Ortholog of  Ceres SEQ ID NO 12625899 as cited in SEQ ID NO 69079

SEQ ID NO: 113019 - protein, 404 aa, Arabidopsis thaliana; identical to SEQ ID NO: 101780
  peptide (1)..(404): Ceres Seq. ID no. 13608682

SEQ ID NO: 113020 - protein, 402 aa, Arabidopsis thaliana; identical to SEQ ID NO: 101781
  peptide (1)..(402): Ceres Seq. ID no. 13608683

SEQ ID NO: 113021 - protein, 304 aa, Arabidopsis thaliana; identical to SEQ ID NO: 101782
  peptide (1)..(304): Ceres Seq. ID no. 13608684

SEQ ID NO: 113022 - DNA, 929 bp, Arabidopsis thaliana; identical to SEQ ID NO: 101783
  misc_feature (1)..(929): Ceres Seq. ID no. 13608686
  misc_feature (1)..(929): Ortholog of  Ceres SEQ ID NO 15175072 as cited in SEQ ID NO 59991
  misc_feature (1)..(929): Ortholog of  Ceres SEQ ID NO 15178850 as cited in SEQ ID NO 0

SEQ ID NO: 113023 - protein, 235 aa, Arabidopsis thaliana; identical to SEQ ID NO: 101784
  peptide (1)..(235): Ceres Seq. ID no. 13608687

SEQ ID NO: 113024 - protein, 231 aa, Arabidopsis thaliana; identical to SEQ ID NO: 101785
  peptide (1)..(231): Ceres Seq. ID no. 13608688

SEQ ID NO: 113025 - DNA, 1619 bp, Arabidopsis thaliana; identical to SEQ ID NO: 101786
  misc_feature (1)..(1619): Ceres Seq. ID no. 13608693
  misc_feature (1)..(1619): Ortholog of  Ceres SEQ ID NO 14312212 as cited in SEQ ID NO 54399
  misc_feature (1)..(1619): Ortholog of  Ceres SEQ ID NO 15225341 as cited in SEQ ID NO 55222
  misc_feature (1)..(1619): Ortholog of  Ceres SEQ ID NO 14311755 as cited in SEQ ID NO 57271
  misc_feature (1)..(1619): Ortholog of  Ceres SEQ ID NO 15171156 as cited in SEQ ID NO 58259
  misc_feature (1)..(1619): Ortholog of  Ceres SEQ ID NO 14302212 as cited in SEQ ID NO 66507
  misc_feature (1)..(1619): Ortholog of  Ceres SEQ ID NO 13653980 as cited in SEQ ID NO 69253

SEQ ID NO: 113026 - protein, 388 aa, Arabidopsis thaliana; identical to SEQ ID NO: 22731
  peptide (1)..(388): Ceres Seq. ID no. 13608694

SEQ ID NO: 113027 - protein, 250 aa, Arabidopsis thaliana; identical to SEQ ID NO: 22732
  peptide (1)..(250): Ceres Seq. ID no. 13608695

SEQ ID NO: 113028 - protein, 249 aa, Arabidopsis thaliana; identical to SEQ ID NO: 22733
  peptide (1)..(249): Ceres Seq. ID no. 13608696

SEQ ID NO: 113029 - DNA, 1625 bp, Arabidopsis thaliana; identical to SEQ ID NO: 101790
  misc_feature (1)..(1625): Ceres Seq. ID no. 13608697
  misc_feature (1)..(1625): Ortholog of  Ceres SEQ ID NO 13647121 as cited in SEQ ID NO 151
  misc_feature (1)..(1625): Ortholog of  Ceres SEQ ID NO 15176411 as cited in SEQ ID NO 54468
  misc_feature (1)..(1625): Ortholog of  Ceres SEQ ID NO 14307131 as cited in SEQ ID NO 59707

SEQ ID NO: 113030 - protein, 485 aa, Arabidopsis thaliana; identical to SEQ ID NO: 101791
  peptide (1)..(485): Ceres Seq. ID no. 13608698

SEQ ID NO: 113031 - protein, 470 aa, Arabidopsis thaliana; identical to SEQ ID NO: 22870
  peptide (1)..(470): Ceres Seq. ID no. 13608699

SEQ ID NO: 113032 - protein, 408 aa, Arabidopsis thaliana; identical to SEQ ID NO: 22871
  peptide (1)..(408): Ceres Seq. ID no. 13608700

SEQ ID NO: 113033 - DNA, 1794 bp, Arabidopsis thaliana; identical to SEQ ID NO: 101794
  misc_feature (1)..(1794): Ceres Seq. ID no. 13608701
  misc_feature (1)..(1794): Ortholog of  Ceres SEQ ID NO 13594536 as cited in SEQ ID NO 51382

SEQ ID NO: 113034 - protein, 464 aa, Arabidopsis thaliana; identical to SEQ ID NO: 101795
  peptide (1)..(464): Ceres Seq. ID no. 13608702

SEQ ID NO: 113035 - protein, 463 aa, Arabidopsis thaliana; identical to SEQ ID NO: 101796
  peptide (1)..(463): Ceres Seq. ID no. 13608703

SEQ ID NO: 113036 - protein, 364 aa, Arabidopsis thaliana; identical to SEQ ID NO: 101797
  peptide (1)..(364): Ceres Seq. ID no. 13608704

SEQ ID NO: 113037 - DNA, 2342 bp, Arabidopsis thaliana; identical to SEQ ID NO: 101798
  misc_feature (1)..(2342): Ceres Seq. ID no. 13608705
  misc_feature (1)..(2342): Ortholog of  Ceres SEQ ID NO 14314144 as cited in SEQ ID NO 54403
  misc_feature (1)..(2342): Ortholog of  Ceres SEQ ID NO 13656177 as cited in SEQ ID NO 64997

SEQ ID NO: 113038 - protein, 739 aa, Arabidopsis thaliana; identical to SEQ ID NO: 101799
  peptide (1)..(739): Ceres Seq. ID no. 13608706

SEQ ID NO: 113039 - protein, 730 aa, Arabidopsis thaliana; identical to SEQ ID NO: 101800
  peptide (1)..(730): Ceres Seq. ID no. 13608707

SEQ ID NO: 113040 - protein, 646 aa, Arabidopsis thaliana; identical to SEQ ID NO: 101801
  peptide (1)..(646): Ceres Seq. ID no. 13608708

SEQ ID NO: 113041 - DNA, 1479 bp, Arabidopsis thaliana; identical to SEQ ID NO: 101802
  misc_feature (1)..(1479): Ceres Seq. ID no. 13608728
  misc_feature (1)..(1479): Ortholog of  Ceres SEQ ID NO 14311136 as cited in SEQ ID NO 56694

SEQ ID NO: 113042 - protein, 399 aa, Arabidopsis thaliana; identical to SEQ ID NO: 101803
  peptide (1)..(399): Ceres Seq. ID no. 13608729

SEQ ID NO: 113043 - protein, 386 aa, Arabidopsis thaliana; identical to SEQ ID NO: 101804
  peptide (1)..(386): Ceres Seq. ID no. 13608730

SEQ ID NO: 113044 - protein, 319 aa, Arabidopsis thaliana; identical to SEQ ID NO: 101805
  peptide (1)..(319): Ceres Seq. ID no. 13608731

SEQ ID NO: 113045 - DNA, 1297 bp, Arabidopsis thaliana; identical to SEQ ID NO: 101806
  misc_feature (1)..(1297): Ceres Seq. ID no. 13608739
  misc_feature (1)..(1297): Ortholog of  Ceres SEQ ID NO 12613953 as cited in SEQ ID NO 68388

SEQ ID NO: 113046 - protein, 327 aa, Arabidopsis thaliana; identical to SEQ ID NO: 27691
  peptide (1)..(327): Ceres Seq. ID no. 13608740

SEQ ID NO: 113047 - protein, 317 aa, Arabidopsis thaliana; identical to SEQ ID NO: 27692
  peptide (1)..(317): Ceres Seq. ID no. 13608741

SEQ ID NO: 113048 - protein, 311 aa, Arabidopsis thaliana; identical to SEQ ID NO: 27693
  peptide (1)..(311): Ceres Seq. ID no. 13608742

SEQ ID NO: 113049 - DNA, 833 bp, Arabidopsis thaliana; identical to SEQ ID NO: 101810
  misc_feature (1)..(833): Ceres Seq. ID no. 13608743
  misc_feature (1)..(833): Ortholog of  Ceres SEQ ID NO 13660598 as cited in SEQ ID NO 67591

SEQ ID NO: 113050 - protein, 184 aa, Arabidopsis thaliana; identical to SEQ ID NO: 30875
  peptide (1)..(184): Ceres Seq. ID no. 13608744

SEQ ID NO: 113051 - protein, 170 aa, Arabidopsis thaliana; identical to SEQ ID NO: 30876
  peptide (1)..(170): Ceres Seq. ID no. 13608745

SEQ ID NO: 113052 - protein, 153 aa, Arabidopsis thaliana; identical to SEQ ID NO: 30877
  peptide (1)..(153): Ceres Seq. ID no. 13608746

SEQ ID NO: 113053 - DNA, 1503 bp, Arabidopsis thaliana; identical to SEQ ID NO: 101814
  misc_feature (1)..(1503): Ceres Seq. ID no. 13608747
  misc_feature (1)..(1503): Ortholog of  Ceres SEQ ID NO 14315193 as cited in SEQ ID NO 57743

SEQ ID NO: 113054 - protein, 410 aa, Arabidopsis thaliana; identical to SEQ ID NO: 36979
  peptide (1)..(410): Ceres Seq. ID no. 13608748

SEQ ID NO: 113055 - protein, 368 aa, Arabidopsis thaliana; identical to SEQ ID NO: 36980
  peptide (1)..(368): Ceres Seq. ID no. 13608749

SEQ ID NO: 113056 - protein, 319 aa, Arabidopsis thaliana; identical to SEQ ID NO: 36981
  peptide (1)..(319): Ceres Seq. ID no. 13608750

SEQ ID NO: 113057 - DNA, 1587 bp, Arabidopsis thaliana; identical to SEQ ID NO: 101818
  misc_feature (1)..(1587): Ceres Seq. ID no. 13608763
  misc_feature (1)..(1587): Ortholog of  Ceres SEQ ID NO 13585587 as cited in SEQ ID NO 65515

SEQ ID NO: 113058 - protein, 528 aa, Arabidopsis thaliana; identical to SEQ ID NO: 101819
  peptide (1)..(528): Ceres Seq. ID no. 13608764

SEQ ID NO: 113059 - protein, 509 aa, Arabidopsis thaliana; identical to SEQ ID NO: 101820
  peptide (1)..(509): Ceres Seq. ID no. 13608765

SEQ ID NO: 113060 - protein, 480 aa, Arabidopsis thaliana; identical to SEQ ID NO: 101821
  peptide (1)..(480): Ceres Seq. ID no. 13608766

SEQ ID NO: 113061 - DNA, 1868 bp, Arabidopsis thaliana; identical to SEQ ID NO: 101822
  misc_feature (1)..(1868): Ceres Seq. ID no. 13608767
  misc_feature (1)..(1868): Ortholog of  Ceres SEQ ID NO 13659971 as cited in SEQ ID NO 67565
  misc_feature (1)..(1868): Ortholog of  Ceres SEQ ID NO 13500385 as cited in SEQ ID NO 67583

SEQ ID NO: 113062 - protein, 545 aa, Arabidopsis thaliana; identical to SEQ ID NO: 101823
  peptide (1)..(545): Ceres Seq. ID no. 13608768

SEQ ID NO: 113063 - protein, 493 aa, Arabidopsis thaliana; identical to SEQ ID NO: 101824
  peptide (1)..(493): Ceres Seq. ID no. 13608769

SEQ ID NO: 113064 - protein, 431 aa, Arabidopsis thaliana; identical to SEQ ID NO: 101825
  peptide (1)..(431): Ceres Seq. ID no. 13608770

SEQ ID NO: 113065 - DNA, 999 bp, Arabidopsis thaliana; identical to SEQ ID NO: 101826
  misc_feature (1)..(999): Ceres Seq. ID no. 13608771
  misc_feature (1)..(999): Ortholog of  Ceres SEQ ID NO 15178847 as cited in SEQ ID NO 1145
  misc_feature (1)..(999): Ortholog of  Ceres SEQ ID NO 14311253 as cited in SEQ ID NO 56483
  misc_feature (1)..(999): Ortholog of  Ceres SEQ ID NO 13597435 as cited in SEQ ID NO 64073
  misc_feature (1)..(999): Ortholog of  Ceres SEQ ID NO 13656209 as cited in SEQ ID NO 64393

SEQ ID NO: 113066 - protein, 226 aa, Arabidopsis thaliana; identical to SEQ ID NO: 26013
  peptide (1)..(226): Ceres Seq. ID no. 13608772

SEQ ID NO: 113067 - DNA, 1205 bp, Arabidopsis thaliana; identical to SEQ ID NO: 101828
  misc_feature (1)..(1205): Ceres Seq. ID no. 13608777
  misc_feature (1)..(1205): Ortholog of  Ceres SEQ ID NO 14307351 as cited in SEQ ID NO 54892

SEQ ID NO: 113068 - protein, 242 aa, Arabidopsis thaliana; identical to SEQ ID NO: 24833
  peptide (1)..(242): Ceres Seq. ID no. 13608778

SEQ ID NO: 113069 - protein, 130 aa, Arabidopsis thaliana; identical to SEQ ID NO: 24834
  peptide (1)..(130): Ceres Seq. ID no. 13608779

SEQ ID NO: 113070 - DNA, 777 bp, Arabidopsis thaliana; identical to SEQ ID NO: 101831
  misc_feature (1)..(777): Ceres Seq. ID no. 13608780
  misc_feature (1)..(777): Ortholog of  Ceres SEQ ID NO 14304941 as cited in SEQ ID NO 53358
  misc_feature (1)..(777): Ortholog of  Ceres SEQ ID NO 15176197 as cited in SEQ ID NO 58416

SEQ ID NO: 113071 - protein, 258 aa, Arabidopsis thaliana; identical to SEQ ID NO: 101832
  peptide (1)..(258): Ceres Seq. ID no. 13608781

SEQ ID NO: 113072 - DNA, 1333 bp, Arabidopsis thaliana; identical to SEQ ID NO: 101833
  misc_feature (1)..(1333): Ceres Seq. ID no. 13608790
  misc_feature (1)..(1333): Ortholog of  Ceres SEQ ID NO 12612330 as cited in SEQ ID NO 56418

SEQ ID NO: 113073 - protein, 376 aa, Arabidopsis thaliana; identical to SEQ ID NO: 24573
  peptide (1)..(376): Ceres Seq. ID no. 13608791

SEQ ID NO: 113074 - protein, 260 aa, Arabidopsis thaliana; identical to SEQ ID NO: 24574
  peptide (1)..(260): Ceres Seq. ID no. 13608792

SEQ ID NO: 113075 - DNA, 801 bp, Arabidopsis thaliana; identical to SEQ ID NO: 101836
  misc_feature (1)..(801): Ceres Seq. ID no. 13608793
  misc_feature (1)..(801): Ortholog of  Ceres SEQ ID NO 15172885 as cited in SEQ ID NO 51883
  misc_feature (1)..(801): Ortholog of  Ceres SEQ ID NO 13594663 as cited in SEQ ID NO 51894
  misc_feature (1)..(801): Ortholog of  Ceres SEQ ID NO 15226128 as cited in SEQ ID NO 60215
  misc_feature (1)..(801): Ortholog of  Ceres SEQ ID NO 14302271 as cited in SEQ ID NO 68360
  misc_feature (1)..(801): Ortholog of  Ceres SEQ ID NO 12635134 as cited in SEQ ID NO 0
  misc_feature (1)..(801): Ortholog of  Ceres SEQ ID NO 13623037 as cited in SEQ ID NO 0
  misc_feature (1)..(801): Ortholog of  Ceres SEQ ID NO 15175141 as cited in SEQ ID NO 0

SEQ ID NO: 113076 - protein, 210 aa, Arabidopsis thaliana; identical to SEQ ID NO: 35626
  peptide (1)..(210): Ceres Seq. ID no. 13608794

SEQ ID NO: 113077 - protein, 165 aa, Arabidopsis thaliana; identical to SEQ ID NO: 35627
  peptide (1)..(165): Ceres Seq. ID no. 13608795

SEQ ID NO: 113078 - protein, 161 aa, Arabidopsis thaliana; identical to SEQ ID NO: 35628
  peptide (1)..(161): Ceres Seq. ID no. 13608796

SEQ ID NO: 113079 - DNA, 1424 bp, Arabidopsis thaliana; identical to SEQ ID NO: 101840
  misc_feature (1)..(1424): Ceres Seq. ID no. 13608797
  misc_feature (1)..(1424): Ortholog of  Ceres SEQ ID NO 15176294 as cited in SEQ ID NO 60388

SEQ ID NO: 113080 - protein, 318 aa, Arabidopsis thaliana; identical to SEQ ID NO: 101841
  peptide (1)..(318): Ceres Seq. ID no. 13608798

SEQ ID NO: 113081 - protein, 207 aa, Arabidopsis thaliana; identical to SEQ ID NO: 101842
  peptide (1)..(207): Ceres Seq. ID no. 13608799

SEQ ID NO: 113082 - protein, 189 aa, Arabidopsis thaliana; identical to SEQ ID NO: 41769
  peptide (1)..(189): Ceres Seq. ID no. 13608800

SEQ ID NO: 113083 - DNA, 1605 bp, Arabidopsis thaliana; identical to SEQ ID NO: 101844
  misc_feature (1)..(1605): Ceres Seq. ID no. 13608809
  misc_feature (1)..(1605): Ortholog of  Ceres SEQ ID NO 13657677 as cited in SEQ ID NO 66119

SEQ ID NO: 113084 - protein, 502 aa, Arabidopsis thaliana; identical to SEQ ID NO: 101845
  peptide (1)..(502): Ceres Seq. ID no. 13608810

SEQ ID NO: 113085 - protein, 497 aa, Arabidopsis thaliana; identical to SEQ ID NO: 101846
  peptide (1)..(497): Ceres Seq. ID no. 13608811

SEQ ID NO: 113086 - protein, 379 aa, Arabidopsis thaliana; identical to SEQ ID NO: 101847
  peptide (1)..(379): Ceres Seq. ID no. 13608812

SEQ ID NO: 113087 - DNA, 1149 bp, Arabidopsis thaliana; identical to SEQ ID NO: 101848
  misc_feature (1)..(1149): Ceres Seq. ID no. 13608817
  misc_feature (1)..(1149): Ortholog of  Ceres SEQ ID NO 13594298 as cited in SEQ ID NO 57803
  misc_feature (1)..(1149): Ortholog of  Ceres SEQ ID NO 13503476 as cited in SEQ ID NO 61978
  misc_feature (1)..(1149): Ortholog of  Ceres SEQ ID NO 12578438 as cited in SEQ ID NO 62201
  misc_feature (1)..(1149): Ortholog of  Ceres SEQ ID NO 12617675 as cited in SEQ ID NO 64656

SEQ ID NO: 113088 - protein, 307 aa, Arabidopsis thaliana; identical to SEQ ID NO: 27892
  peptide (1)..(307): Ceres Seq. ID no. 13608818

SEQ ID NO: 113089 - protein, 299 aa, Arabidopsis thaliana; identical to SEQ ID NO: 27893
  peptide (1)..(299): Ceres Seq. ID no. 13608819

SEQ ID NO: 113090 - protein, 242 aa, Arabidopsis thaliana; identical to SEQ ID NO: 27894
  peptide (1)..(242): Ceres Seq. ID no. 13608820

SEQ ID NO: 113091 - DNA, 1304 bp, Arabidopsis thaliana; identical to SEQ ID NO: 101852
  misc_feature (1)..(1304): Ceres Seq. ID no. 13608825
  misc_feature (1)..(1304): Ortholog of  Ceres SEQ ID NO 14315518 as cited in SEQ ID NO 60467
  misc_feature (1)..(1304): Ortholog of  Ceres SEQ ID NO 12585444 as cited in SEQ ID NO 62814

SEQ ID NO: 113092 - protein, 300 aa, Arabidopsis thaliana; identical to SEQ ID NO: 29922
  peptide (1)..(300): Ceres Seq. ID no. 13608826

SEQ ID NO: 113093 - protein, 284 aa, Arabidopsis thaliana; identical to SEQ ID NO: 29923
  peptide (1)..(284): Ceres Seq. ID no. 13608827

SEQ ID NO: 113094 - DNA, 1026 bp, Arabidopsis thaliana; identical to SEQ ID NO: 101855
  misc_feature (1)..(1026): Ceres Seq. ID no. 13608828
  misc_feature (1)..(1026): Ortholog of  Ceres SEQ ID NO 13656050 as cited in SEQ ID NO 64724

SEQ ID NO: 113095 - protein, 266 aa, Arabidopsis thaliana; identical to SEQ ID NO: 101856
  peptide (1)..(266): Ceres Seq. ID no. 13608829

SEQ ID NO: 113096 - protein, 252 aa, Arabidopsis thaliana; identical to SEQ ID NO: 101857
  peptide (1)..(252): Ceres Seq. ID no. 13608830

SEQ ID NO: 113097 - protein, 162 aa, Arabidopsis thaliana; identical to SEQ ID NO: 101858
  peptide (1)..(162): Ceres Seq. ID no. 13608831

SEQ ID NO: 113098 - DNA, 824 bp, Arabidopsis thaliana; identical to SEQ ID NO: 101859
  misc_feature (1)..(824): Ceres Seq. ID no. 13608844
  misc_feature (1)..(824): Ortholog of  Ceres SEQ ID NO 12608429 as cited in SEQ ID NO 60231

SEQ ID NO: 113099 - protein, 125 aa, Arabidopsis thaliana; identical to SEQ ID NO: 27736
  peptide (1)..(125): Ceres Seq. ID no. 13608845

SEQ ID NO: 113100 - protein, 79 aa, Arabidopsis thaliana; identical to SEQ ID NO: 101861
  peptide (1)..(79): Ceres Seq. ID no. 13608846

SEQ ID NO: 113101 - protein, 77 aa, Arabidopsis thaliana; identical to SEQ ID NO: 27737
  peptide (1)..(77): Ceres Seq. ID no. 13608847

SEQ ID NO: 113102 - DNA, 2143 bp, Arabidopsis thaliana; identical to SEQ ID NO: 101863
  misc_feature (1)..(2143): Ceres Seq. ID no. 13608852
  misc_feature (1)..(2143): Ortholog of  Ceres SEQ ID NO 14303201 as cited in SEQ ID NO 67304

SEQ ID NO: 113103 - protein, 588 aa, Arabidopsis thaliana; identical to SEQ ID NO: 101864
  peptide (1)..(588): Ceres Seq. ID no. 13608853

SEQ ID NO: 113104 - protein, 450 aa, Arabidopsis thaliana; identical to SEQ ID NO: 101865
  peptide (1)..(450): Ceres Seq. ID no. 13608854

SEQ ID NO: 113105 - protein, 428 aa, Arabidopsis thaliana; identical to SEQ ID NO: 101866
  peptide (1)..(428): Ceres Seq. ID no. 13608855

SEQ ID NO: 113106 - DNA, 669 bp, Arabidopsis thaliana; identical to SEQ ID NO: 101867
  misc_feature (1)..(669): Ceres Seq. ID no. 13608856
  misc_feature (1)..(669): Ortholog of  Ceres SEQ ID NO 12589876 as cited in SEQ ID NO 0
  misc_feature (1)..(669): Ortholog of  Ceres SEQ ID NO 15179249 as cited in SEQ ID NO 0

SEQ ID NO: 113107 - protein, 173 aa, Arabidopsis thaliana; identical to SEQ ID NO: 101868
  peptide (1)..(173): Ceres Seq. ID no. 13608857

SEQ ID NO: 113108 - protein, 171 aa, Arabidopsis thaliana; identical to SEQ ID NO: 101869
  peptide (1)..(171): Ceres Seq. ID no. 13608858

SEQ ID NO: 113109 - protein, 105 aa, Arabidopsis thaliana; identical to SEQ ID NO: 101870
  peptide (1)..(105): Ceres Seq. ID no. 13608859

SEQ ID NO: 113110 - DNA, 1889 bp, Arabidopsis thaliana; identical to SEQ ID NO: 101871
  misc_feature (1)..(1889): Ceres Seq. ID no. 13608879
  misc_feature (1)..(1889): Ortholog of  Ceres SEQ ID NO 14315146 as cited in SEQ ID NO 52929
  misc_feature (1)..(1889): Ortholog of  Ceres SEQ ID NO 14302263 as cited in SEQ ID NO 64701
  misc_feature (1)..(1889): Ortholog of  Ceres SEQ ID NO 13584538 as cited in SEQ ID NO 64739
  misc_feature (1)..(1889): Ortholog of  Ceres SEQ ID NO 15169643 as cited in SEQ ID NO 64826
  misc_feature (1)..(1889): Ortholog of  Ceres SEQ ID NO 15169647 as cited in SEQ ID NO 64930

SEQ ID NO: 113111 - protein, 498 aa, Arabidopsis thaliana; identical to SEQ ID NO: 21788
  peptide (1)..(498): Ceres Seq. ID no. 13608880

SEQ ID NO: 113112 - protein, 496 aa, Arabidopsis thaliana; identical to SEQ ID NO: 21789
  peptide (1)..(496): Ceres Seq. ID no. 13608881

SEQ ID NO: 113113 - protein, 474 aa, Arabidopsis thaliana; identical to SEQ ID NO: 21790
  peptide (1)..(474): Ceres Seq. ID no. 13608882

SEQ ID NO: 113114 - DNA, 1227 bp, Arabidopsis thaliana; identical to SEQ ID NO: 101875
  misc_feature (1)..(1227): Ceres Seq. ID no. 13608883
  misc_feature (1)..(1227): Ortholog of  Ceres SEQ ID NO 14303355 as cited in SEQ ID NO 59746
  misc_feature (1)..(1227): Ortholog of  Ceres SEQ ID NO 14302415 as cited in SEQ ID NO 62781

SEQ ID NO: 113115 - protein, 339 aa, Arabidopsis thaliana; identical to SEQ ID NO: 101876
  peptide (1)..(339): Ceres Seq. ID no. 13608884

SEQ ID NO: 113116 - protein, 314 aa, Arabidopsis thaliana; identical to SEQ ID NO: 101877
  peptide (1)..(314): Ceres Seq. ID no. 13608885

SEQ ID NO: 113117 - protein, 284 aa, Arabidopsis thaliana; identical to SEQ ID NO: 101878
  peptide (1)..(284): Ceres Seq. ID no. 13608886

SEQ ID NO: 113118 - DNA, 887 bp, Arabidopsis thaliana; identical to SEQ ID NO: 101879
  misc_feature (1)..(887): Ceres Seq. ID no. 13608897
  misc_feature (1)..(887): Ortholog of  Ceres SEQ ID NO 12611474 as cited in SEQ ID NO 56549

SEQ ID NO: 113119 - protein, 261 aa, Arabidopsis thaliana; identical to SEQ ID NO: 101880
  peptide (1)..(261): Ceres Seq. ID no. 13608898

SEQ ID NO: 113120 - protein, 247 aa, Arabidopsis thaliana; identical to SEQ ID NO: 101881
  peptide (1)..(247): Ceres Seq. ID no. 13608899

SEQ ID NO: 113121 - protein, 165 aa, Arabidopsis thaliana; identical to SEQ ID NO: 37145
  peptide (1)..(165): Ceres Seq. ID no. 13608900

SEQ ID NO: 113122 - DNA, 857 bp, Arabidopsis thaliana; identical to SEQ ID NO: 101883
  misc_feature (1)..(857): Ceres Seq. ID no. 13608909
  misc_feature (1)..(857): Ortholog of  Ceres SEQ ID NO 13661939 as cited in SEQ ID NO 61170
  misc_feature (1)..(857): Ortholog of  Ceres SEQ ID NO 14309041 as cited in SEQ ID NO 0
  misc_feature (1)..(857): Ortholog of  Ceres SEQ ID NO 14309611 as cited in SEQ ID NO 0

SEQ ID NO: 113123 - protein, 176 aa, Arabidopsis thaliana; identical to SEQ ID NO: 101884
  peptide (1)..(176): Ceres Seq. ID no. 13608910

SEQ ID NO: 113124 - protein, 142 aa, Arabidopsis thaliana; identical to SEQ ID NO: 101885
  peptide (1)..(142): Ceres Seq. ID no. 13608911

SEQ ID NO: 113125 - DNA, 1302 bp, Arabidopsis thaliana; identical to SEQ ID NO: 101886
  misc_feature (1)..(1302): Ceres Seq. ID no. 13608912
  misc_feature (1)..(1302): Ortholog of  Ceres SEQ ID NO 15170617 as cited in SEQ ID NO 52614

SEQ ID NO: 113126 - protein, 268 aa, Arabidopsis thaliana; identical to SEQ ID NO: 21256
  peptide (1)..(268): Ceres Seq. ID no. 13608913

SEQ ID NO: 113127 - protein, 261 aa, Arabidopsis thaliana; identical to SEQ ID NO: 21257
  peptide (1)..(261): Ceres Seq. ID no. 13608914

SEQ ID NO: 113128 - protein, 140 aa, Arabidopsis thaliana; identical to SEQ ID NO: 21258
  peptide (1)..(140): Ceres Seq. ID no. 13608915

SEQ ID NO: 113129 - DNA, 558 bp, Arabidopsis thaliana; identical to SEQ ID NO: 101890
  misc_feature (1)..(558): Ceres Seq. ID no. 13608924
  misc_feature (1)..(558): Ortholog of  Ceres SEQ ID NO 15170337 as cited in SEQ ID NO 57970

SEQ ID NO: 113130 - protein, 185 aa, Arabidopsis thaliana; identical to SEQ ID NO: 101891
  peptide (1)..(185): Ceres Seq. ID no. 13608925

SEQ ID NO: 113131 - protein, 178 aa, Arabidopsis thaliana; identical to SEQ ID NO: 91672
  peptide (1)..(178): Ceres Seq. ID no. 13608926

SEQ ID NO: 113132 - DNA, 905 bp, Arabidopsis thaliana; identical to SEQ ID NO: 101893
  misc_feature (1)..(905): Ceres Seq. ID no. 13608935
  misc_feature (1)..(905): Ortholog of  Ceres SEQ ID NO 13584593 as cited in SEQ ID NO 65340

SEQ ID NO: 113133 - protein, 213 aa, Arabidopsis thaliana; identical to SEQ ID NO: 29716
  peptide (1)..(213): Ceres Seq. ID no. 13608936

SEQ ID NO: 113134 - DNA, 1271 bp, Arabidopsis thaliana; identical to SEQ ID NO: 101895
  misc_feature (1)..(1271): Ceres Seq. ID no. 13608953
  misc_feature (1)..(1271): Ortholog of  Ceres SEQ ID NO 12598859 as cited in SEQ ID NO 62872
  misc_feature (1)..(1271): Ortholog of  Ceres SEQ ID NO 12617350 as cited in SEQ ID NO 63777
  misc_feature (1)..(1271): Ortholog of  Ceres SEQ ID NO 13598749 as cited in SEQ ID NO 64341
  misc_feature (1)..(1271): Ortholog of  Ceres SEQ ID NO 15176153 as cited in SEQ ID NO 0
  misc_feature (1)..(1271): Ortholog of  Ceres SEQ ID NO 15179157 as cited in SEQ ID NO 0

SEQ ID NO: 113135 - protein, 337 aa, Arabidopsis thaliana; identical to SEQ ID NO: 22402
  peptide (1)..(337): Ceres Seq. ID no. 13608954

SEQ ID NO: 113136 - protein, 279 aa, Arabidopsis thaliana; identical to SEQ ID NO: 22403
  peptide (1)..(279): Ceres Seq. ID no. 13608955

SEQ ID NO: 113137 - DNA, 774 bp, Arabidopsis thaliana; identical to SEQ ID NO: 101898
  misc_feature (1)..(774): Ceres Seq. ID no. 13608976
  misc_feature (1)..(774): Ortholog of  Ceres SEQ ID NO 13599287 as cited in SEQ ID NO 338
  misc_feature (1)..(774): Ortholog of  Ceres SEQ ID NO 14314817 as cited in SEQ ID NO 52571

SEQ ID NO: 113138 - protein, 169 aa, Arabidopsis thaliana; identical to SEQ ID NO: 35932
  peptide (1)..(169): Ceres Seq. ID no. 13608977

SEQ ID NO: 113139 - DNA, 1839 bp, Arabidopsis thaliana; identical to SEQ ID NO: 101900
  misc_feature (1)..(1839): Ceres Seq. ID no. 13608997
  misc_feature (1)..(1839): Ortholog of  Ceres SEQ ID NO 14311882 as cited in SEQ ID NO 51638
  misc_feature (1)..(1839): Ortholog of  Ceres SEQ ID NO 14314567 as cited in SEQ ID NO 52335
  misc_feature (1)..(1839): Ortholog of  Ceres SEQ ID NO 13595437 as cited in SEQ ID NO 56562

SEQ ID NO: 113140 - protein, 351 aa, Arabidopsis thaliana; identical to SEQ ID NO: 77688
  peptide (1)..(351): Ceres Seq. ID no. 13608998

SEQ ID NO: 113141 - protein, 343 aa, Arabidopsis thaliana; identical to SEQ ID NO: 77689
  peptide (1)..(343): Ceres Seq. ID no. 13608999

SEQ ID NO: 113142 - protein, 336 aa, Arabidopsis thaliana; identical to SEQ ID NO: 77690
  peptide (1)..(336): Ceres Seq. ID no. 13609000

SEQ ID NO: 113143 - DNA, 835 bp, Arabidopsis thaliana; identical to SEQ ID NO: 101904
  misc_feature (1)..(835): Ceres Seq. ID no. 13609005
  misc_feature (1)..(835): Ortholog of  Ceres SEQ ID NO 12623521 as cited in SEQ ID NO 61505

SEQ ID NO: 113144 - protein, 162 aa, Arabidopsis thaliana; identical to SEQ ID NO: 101905
  peptide (1)..(162): Ceres Seq. ID no. 13609006

SEQ ID NO: 113145 - protein, 156 aa, Arabidopsis thaliana; identical to SEQ ID NO: 101906
  peptide (1)..(156): Ceres Seq. ID no. 13609007

SEQ ID NO: 113146 - protein, 86 aa, Arabidopsis thaliana; identical to SEQ ID NO: 101907
  peptide (1)..(86): Ceres Seq. ID no. 13609008

SEQ ID NO: 113147 - DNA, 1293 bp, Arabidopsis thaliana; identical to SEQ ID NO: 101908
  misc_feature (1)..(1293): Ceres Seq. ID no. 13609019
  misc_feature (1)..(1293): Ortholog of  Ceres SEQ ID NO 13596519 as cited in SEQ ID NO 62572
  misc_feature (1)..(1293): Ortholog of  Ceres SEQ ID NO 12625108 as cited in SEQ ID NO 68102

SEQ ID NO: 113148 - protein, 255 aa, Arabidopsis thaliana; identical to SEQ ID NO: 34839
  peptide (1)..(255): Ceres Seq. ID no. 13609020

SEQ ID NO: 113149 - protein, 221 aa, Arabidopsis thaliana; identical to SEQ ID NO: 34840
  peptide (1)..(221): Ceres Seq. ID no. 13609021

SEQ ID NO: 113150 - protein, 201 aa, Arabidopsis thaliana; identical to SEQ ID NO: 34841
  peptide (1)..(201): Ceres Seq. ID no. 13609022

SEQ ID NO: 113151 - DNA, 2729 bp, Arabidopsis thaliana; identical to SEQ ID NO: 101912
  misc_feature (1)..(2729): Ceres Seq. ID no. 13609035
  misc_feature (1)..(2729): Ortholog of  Ceres SEQ ID NO 13598668 as cited in SEQ ID NO 60784
  misc_feature (1)..(2729): Ortholog of  Ceres SEQ ID NO 13659835 as cited in SEQ ID NO 60791

SEQ ID NO: 113152 - protein, 98 aa, Arabidopsis thaliana; identical to SEQ ID NO: 101913
  peptide (1)..(98): Ceres Seq. ID no. 13609036

SEQ ID NO: 113153 - protein, 55 aa, Arabidopsis thaliana; identical to SEQ ID NO: 45608
  peptide (1)..(55): Ceres Seq. ID no. 13609037

SEQ ID NO: 113154 - DNA, 925 bp, Arabidopsis thaliana; identical to SEQ ID NO: 101915
  misc_feature (1)..(925): Ceres Seq. ID no. 13609062
  misc_feature (1)..(925): Ortholog of  Ceres SEQ ID NO 14314461 as cited in SEQ ID NO 52355
  misc_feature (1)..(925): Ortholog of  Ceres SEQ ID NO 14306812 as cited in SEQ ID NO 56361
  misc_feature (1)..(925): Ortholog of  Ceres SEQ ID NO 15168461 as cited in SEQ ID NO 57068

SEQ ID NO: 113155 - protein, 239 aa, Arabidopsis thaliana; identical to SEQ ID NO: 28662
  peptide (1)..(239): Ceres Seq. ID no. 13609063

SEQ ID NO: 113156 - DNA, 1521 bp, Arabidopsis thaliana; identical to SEQ ID NO: 101917
  misc_feature (1)..(1521): Ceres Seq. ID no. 13609069
  misc_feature (1)..(1521): Ortholog of  Ceres SEQ ID NO 13662301 as cited in SEQ ID NO 68114

SEQ ID NO: 113157 - protein, 392 aa, Arabidopsis thaliana; identical to SEQ ID NO: 101918
  peptide (1)..(392): Ceres Seq. ID no. 13609070

SEQ ID NO: 113158 - protein, 364 aa, Arabidopsis thaliana; identical to SEQ ID NO: 28942
  peptide (1)..(364): Ceres Seq. ID no. 13609071

SEQ ID NO: 113159 - protein, 318 aa, Arabidopsis thaliana; identical to SEQ ID NO: 28943
  peptide (1)..(318): Ceres Seq. ID no. 13609072

SEQ ID NO: 113160 - DNA, 1275 bp, Arabidopsis thaliana; identical to SEQ ID NO: 101921
  misc_feature (1)..(1275): Ceres Seq. ID no. 13609073
  misc_feature (1)..(1275): Ortholog of  Ceres SEQ ID NO 14308095 as cited in SEQ ID NO 55286

SEQ ID NO: 113161 - protein, 342 aa, Arabidopsis thaliana; identical to SEQ ID NO: 101922
  peptide (1)..(342): Ceres Seq. ID no. 13609074

SEQ ID NO: 113162 - protein, 204 aa, Arabidopsis thaliana; identical to SEQ ID NO: 84981
  peptide (1)..(204): Ceres Seq. ID no. 13609075

SEQ ID NO: 113163 - protein, 202 aa, Arabidopsis thaliana; identical to SEQ ID NO: 84982
  peptide (1)..(202): Ceres Seq. ID no. 13609076

SEQ ID NO: 113164 - DNA, 1469 bp, Arabidopsis thaliana; identical to SEQ ID NO: 101925
  misc_feature (1)..(1469): Ceres Seq. ID no. 13609077
  misc_feature (1)..(1469): Ortholog of  Ceres SEQ ID NO 13658778 as cited in SEQ ID NO 66511

SEQ ID NO: 113165 - protein, 430 aa, Arabidopsis thaliana; identical to SEQ ID NO: 40164
  peptide (1)..(430): Ceres Seq. ID no. 13609078

SEQ ID NO: 113166 - protein, 393 aa, Arabidopsis thaliana; identical to SEQ ID NO: 40165
  peptide (1)..(393): Ceres Seq. ID no. 13609079

SEQ ID NO: 113167 - protein, 364 aa, Arabidopsis thaliana; identical to SEQ ID NO: 40166
  peptide (1)..(364): Ceres Seq. ID no. 13609080

SEQ ID NO: 113168 - DNA, 1017 bp, Arabidopsis thaliana; identical to SEQ ID NO: 101929
  misc_feature (1)..(1017): Ceres Seq. ID no. 13609088
  misc_feature (1)..(1017): Ortholog of  Ceres SEQ ID NO 13596944 as cited in SEQ ID NO 68910

SEQ ID NO: 113169 - protein, 338 aa, Arabidopsis thaliana; identical to SEQ ID NO: 101930
  peptide (1)..(338): Ceres Seq. ID no. 13609089

SEQ ID NO: 113170 - protein, 335 aa, Arabidopsis thaliana; identical to SEQ ID NO: 87862
  peptide (1)..(335): Ceres Seq. ID no. 13609090

SEQ ID NO: 113171 - protein, 232 aa, Arabidopsis thaliana; identical to SEQ ID NO: 87863
  peptide (1)..(232): Ceres Seq. ID no. 13609091

SEQ ID NO: 113172 - DNA, 1457 bp, Arabidopsis thaliana; identical to SEQ ID NO: 101933
  misc_feature (1)..(1457): Ceres Seq. ID no. 13609096
  misc_feature (1)..(1457): Ortholog of  Ceres SEQ ID NO 15177336 as cited in SEQ ID NO 51374

SEQ ID NO: 113173 - protein, 475 aa, Arabidopsis thaliana; identical to SEQ ID NO: 101934
  peptide (1)..(475): Ceres Seq. ID no. 13609097

SEQ ID NO: 113174 - protein, 467 aa, Arabidopsis thaliana; identical to SEQ ID NO: 101935
  peptide (1)..(467): Ceres Seq. ID no. 13609098

SEQ ID NO: 113175 - protein, 455 aa, Arabidopsis thaliana; identical to SEQ ID NO: 101936
  peptide (1)..(455): Ceres Seq. ID no. 13609099

SEQ ID NO: 113176 - DNA, 830 bp, Arabidopsis thaliana; identical to SEQ ID NO: 101937
  misc_feature (1)..(830): Ceres Seq. ID no. 13609100
  misc_feature (1)..(830): Ortholog of  Ceres SEQ ID NO 12626248 as cited in SEQ ID NO 65768

SEQ ID NO: 113177 - protein, 232 aa, Arabidopsis thaliana; identical to SEQ ID NO: 101938
  peptide (1)..(232): Ceres Seq. ID no. 13609101

SEQ ID NO: 113178 - protein, 210 aa, Arabidopsis thaliana; identical to SEQ ID NO: 37125
  peptide (1)..(210): Ceres Seq. ID no. 13609102

SEQ ID NO: 113179 - protein, 126 aa, Arabidopsis thaliana; identical to SEQ ID NO: 37126
  peptide (1)..(126): Ceres Seq. ID no. 13609103

SEQ ID NO: 113180 - DNA, 1111 bp, Arabidopsis thaliana; identical to SEQ ID NO: 101941
  misc_feature (1)..(1111): Ceres Seq. ID no. 13609112
  misc_feature (1)..(1111): Ortholog of  Ceres SEQ ID NO 14316300 as cited in SEQ ID NO 59995
  misc_feature (1)..(1111): Ortholog of  Ceres SEQ ID NO 13662758 as cited in SEQ ID NO 64912
  misc_feature (1)..(1111): Ortholog of  Ceres SEQ ID NO 13595881 as cited in SEQ ID NO 67709

SEQ ID NO: 113181 - protein, 288 aa, Arabidopsis thaliana; identical to SEQ ID NO: 101942
  peptide (1)..(288): Ceres Seq. ID no. 13609113

SEQ ID NO: 113182 - protein, 267 aa, Arabidopsis thaliana; identical to SEQ ID NO: 101943
  peptide (1)..(267): Ceres Seq. ID no. 13609114

SEQ ID NO: 113183 - DNA, 817 bp, Arabidopsis thaliana; identical to SEQ ID NO: 101944
  misc_feature (1)..(817): Ceres Seq. ID no. 13609115
  misc_feature (1)..(817): Ortholog of  Ceres SEQ ID NO 13582538 as cited in SEQ ID NO 57724

SEQ ID NO: 113184 - protein, 87 aa, Arabidopsis thaliana; identical to SEQ ID NO: 101945
  peptide (1)..(87): Ceres Seq. ID no. 13609116

SEQ ID NO: 113185 - DNA, 644 bp, Arabidopsis thaliana; identical to SEQ ID NO: 101946
  misc_feature (1)..(644): Ceres Seq. ID no. 13609140
  misc_feature (1)..(644): Ortholog of  Ceres SEQ ID NO 13584968 as cited in SEQ ID NO 64327

SEQ ID NO: 113186 - protein, 144 aa, Arabidopsis thaliana; identical to SEQ ID NO: 24197
  peptide (1)..(144): Ceres Seq. ID no. 13609141

SEQ ID NO: 113187 - protein, 119 aa, Arabidopsis thaliana; identical to SEQ ID NO: 24198
  peptide (1)..(119): Ceres Seq. ID no. 13609142

SEQ ID NO: 113188 - protein, 74 aa, Arabidopsis thaliana; identical to SEQ ID NO: 24199
  peptide (1)..(74): Ceres Seq. ID no. 13609143

SEQ ID NO: 113189 - DNA, 739 bp, Arabidopsis thaliana; identical to SEQ ID NO: 101950
  misc_feature (1)..(739): Ceres Seq. ID no. 13609144
  misc_feature (1)..(739): Ortholog of  Ceres SEQ ID NO 13595613 as cited in SEQ ID NO 59866

SEQ ID NO: 113190 - protein, 161 aa, Arabidopsis thaliana; identical to SEQ ID NO: 20789
  peptide (1)..(161): Ceres Seq. ID no. 13609145

SEQ ID NO: 113191 - protein, 133 aa, Arabidopsis thaliana; identical to SEQ ID NO: 20790
  peptide (1)..(133): Ceres Seq. ID no. 13609146

SEQ ID NO: 113192 - protein, 87 aa, Arabidopsis thaliana; identical to SEQ ID NO: 20791
  peptide (1)..(87): Ceres Seq. ID no. 13609147

SEQ ID NO: 113193 - DNA, 631 bp, Arabidopsis thaliana; identical to SEQ ID NO: 101954
  misc_feature (1)..(631): Ceres Seq. ID no. 13609148
  misc_feature (1)..(631): Ortholog of  Ceres SEQ ID NO 12322366 as cited in SEQ ID NO 20549

SEQ ID NO: 113194 - protein, 98 aa, Arabidopsis thaliana; identical to SEQ ID NO: 28278
  peptide (1)..(98): Ceres Seq. ID no. 13609149

SEQ ID NO: 113195 - DNA, 1018 bp, Arabidopsis thaliana; identical to SEQ ID NO: 101956
  misc_feature (1)..(1018): Ceres Seq. ID no. 13609154
  misc_feature (1)..(1018): Ortholog of  Ceres SEQ ID NO 14304626 as cited in SEQ ID NO 52955

SEQ ID NO: 113196 - protein, 185 aa, Arabidopsis thaliana [sequence omitted]

SEQ ID NO: 113197 - DNA, 1466 bp, Arabidopsis thaliana; identical to SEQ ID NO: 101958
  misc_feature (1)..(1466): Ceres Seq. ID no. 13609160
  misc_feature (1)..(1466): Ortholog of  Ceres SEQ ID NO 15168965 as cited in SEQ ID NO 20607
  misc_feature (1)..(1466): Ortholog of  Ceres SEQ ID NO 13597454 as cited in SEQ ID NO 64121
  misc_feature (1)..(1466): Ortholog of  Ceres SEQ ID NO 13623385 as cited in SEQ ID NO 0

SEQ ID NO: 113198 - protein, 413 aa, Arabidopsis thaliana; identical to SEQ ID NO: 41296
  peptide (1)..(413): Ceres Seq. ID no. 13609161

SEQ ID NO: 113199 - protein, 315 aa, Arabidopsis thaliana; identical to SEQ ID NO: 41297
  peptide (1)..(315): Ceres Seq. ID no. 13609162

SEQ ID NO: 113200 - protein, 307 aa, Arabidopsis thaliana; identical to SEQ ID NO: 41298
  peptide (1)..(307): Ceres Seq. ID no. 13609163

SEQ ID NO: 113201 - DNA, 1296 bp, Arabidopsis thaliana; identical to SEQ ID NO: 101962
  misc_feature (1)..(1296): Ceres Seq. ID no. 13609168
  misc_feature (1)..(1296): Ortholog of  Ceres SEQ ID NO 15176375 as cited in SEQ ID NO 53238
  misc_feature (1)..(1296): Ortholog of  Ceres SEQ ID NO 15170532 as cited in SEQ ID NO 55671
  misc_feature (1)..(1296): Ortholog of  Ceres SEQ ID NO 14316507 as cited in SEQ ID NO 57397
  misc_feature (1)..(1296): Ortholog of  Ceres SEQ ID NO 13598532 as cited in SEQ ID NO 65204
  misc_feature (1)..(1296): Ortholog of  Ceres SEQ ID NO 13656849 as cited in SEQ ID NO 65764
  misc_feature (1)..(1296): Ortholog of  Ceres SEQ ID NO 13655298 as cited in SEQ ID NO 68914
  misc_feature (1)..(1296): Ortholog of  Ceres SEQ ID NO 13656501 as cited in SEQ ID NO 69206

SEQ ID NO: 113202 - protein, 313 aa, Arabidopsis thaliana; identical to SEQ ID NO: 25957
  peptide (1)..(313): Ceres Seq. ID no. 13609169

SEQ ID NO: 113203 - protein, 303 aa, Arabidopsis thaliana; identical to SEQ ID NO: 25958
  peptide (1)..(303): Ceres Seq. ID no. 13609170

SEQ ID NO: 113204 - protein, 247 aa, Arabidopsis thaliana; identical to SEQ ID NO: 25959
  peptide (1)..(247): Ceres Seq. ID no. 13609171

SEQ ID NO: 113205 - DNA, 1255 bp, Arabidopsis thaliana; identical to SEQ ID NO: 101966
  misc_feature (1)..(1255): Ceres Seq. ID no. 13609177
  misc_feature (1)..(1255): Ortholog of  Ceres SEQ ID NO 13658911 as cited in SEQ ID NO 66294
  misc_feature (1)..(1255): Ortholog of  Ceres SEQ ID NO 13660693 as cited in SEQ ID NO 67411

SEQ ID NO: 113206 - protein, 364 aa, Arabidopsis thaliana; identical to SEQ ID NO: 101967
  peptide (1)..(364): Ceres Seq. ID no. 13609178

SEQ ID NO: 113207 - protein, 352 aa, Arabidopsis thaliana; identical to SEQ ID NO: 27650
  peptide (1)..(352): Ceres Seq. ID no. 13609179

SEQ ID NO: 113208 - protein, 294 aa, Arabidopsis thaliana; identical to SEQ ID NO: 101969
  peptide (1)..(294): Ceres Seq. ID no. 13609180

SEQ ID NO: 113209 - DNA, 1248 bp, Arabidopsis thaliana; identical to SEQ ID NO: 101970
  misc_feature (1)..(1248): Ceres Seq. ID no. 13609192
  misc_feature (1)..(1248): Ortholog of  Ceres SEQ ID NO 15175496 as cited in SEQ ID NO 56127
  misc_feature (1)..(1248): Ortholog of  Ceres SEQ ID NO 13639124 as cited in SEQ ID NO 56718
  misc_feature (1)..(1248): Ortholog of  Ceres SEQ ID NO 13598714 as cited in SEQ ID NO 62656
  misc_feature (1)..(1248): Ortholog of  Ceres SEQ ID NO 13597519 as cited in SEQ ID NO 64759
  misc_feature (1)..(1248): Ortholog of  Ceres SEQ ID NO 13597870 as cited in SEQ ID NO 64982
  misc_feature (1)..(1248): Ortholog of  Ceres SEQ ID NO 13656123 as cited in SEQ ID NO 65212

SEQ ID NO: 113210 - protein, 357 aa, Arabidopsis thaliana; identical to SEQ ID NO: 101971
  peptide (1)..(357): Ceres Seq. ID no. 13609193

SEQ ID NO: 113211 - protein, 341 aa, Arabidopsis thaliana; identical to SEQ ID NO: 36756
  peptide (1)..(341): Ceres Seq. ID no. 13609194

SEQ ID NO: 113212 - protein, 328 aa, Arabidopsis thaliana; identical to SEQ ID NO: 36757
  peptide (1)..(328): Ceres Seq. ID no. 13609195

SEQ ID NO: 113213 - DNA, 820 bp, Arabidopsis thaliana; identical to SEQ ID NO: 101974
  misc_feature (1)..(820): Ceres Seq. ID no. 13609215
  misc_feature (1)..(820): Ortholog of  Ceres SEQ ID NO 12597207 as cited in SEQ ID NO 62146

SEQ ID NO: 113214 - protein, 222 aa, Arabidopsis thaliana; identical to SEQ ID NO: 101975
  peptide (1)..(222): Ceres Seq. ID no. 13609216

SEQ ID NO: 113215 - protein, 206 aa, Arabidopsis thaliana [sequence omitted]

SEQ ID NO: 113216 - protein, 187 aa, Arabidopsis thaliana; identical to SEQ ID NO: 37119
  peptide (1)..(187): Ceres Seq. ID no. 13609218

SEQ ID NO: 113217 - DNA, 674 bp, Arabidopsis thaliana; identical to SEQ ID NO: 101978
  misc_feature (1)..(674): Ceres Seq. ID no. 13609223
  misc_feature (1)..(674): Ortholog of  Ceres SEQ ID NO 14305967 as cited in SEQ ID NO 1343
  misc_feature (1)..(674): Ortholog of  Ceres SEQ ID NO 14309614 as cited in SEQ ID NO 52633
  misc_feature (1)..(674): Ortholog of  Ceres SEQ ID NO 12626306 as cited in SEQ ID NO 65869

SEQ ID NO: 113218 - protein, 184 aa, Arabidopsis thaliana; identical to SEQ ID NO: 101979
  peptide (1)..(184): Ceres Seq. ID no. 13609224

SEQ ID NO: 113219 - protein, 161 aa, Arabidopsis thaliana; identical to SEQ ID NO: 78739
  peptide (1)..(161): Ceres Seq. ID no. 13609225

SEQ ID NO: 113220 - protein, 140 aa, Arabidopsis thaliana; identical to SEQ ID NO: 78740
  peptide (1)..(140): Ceres Seq. ID no. 13609226

SEQ ID NO: 113221 - DNA, 1685 bp, Arabidopsis thaliana; identical to SEQ ID NO: 101982
  misc_feature (1)..(1685): Ceres Seq. ID no. 13609227
  misc_feature (1)..(1685): Ortholog of  Ceres SEQ ID NO 13656161 as cited in SEQ ID NO 64908
  misc_feature (1)..(1685): Ortholog of  Ceres SEQ ID NO 13597600 as cited in SEQ ID NO 65142

SEQ ID NO: 113222 - protein, 389 aa, Arabidopsis thaliana; identical to SEQ ID NO: 44528
  peptide (1)..(389): Ceres Seq. ID no. 13609228

SEQ ID NO: 113223 - protein, 345 aa, Arabidopsis thaliana; identical to SEQ ID NO: 44529
  peptide (1)..(345): Ceres Seq. ID no. 13609229

SEQ ID NO: 113224 - protein, 341 aa, Arabidopsis thaliana; identical to SEQ ID NO: 44530
  peptide (1)..(341): Ceres Seq. ID no. 13609230

SEQ ID NO: 113225 - DNA, 1950 bp, Arabidopsis thaliana; identical to SEQ ID NO: 101986
  misc_feature (1)..(1950): Ceres Seq. ID no. 13609231
  misc_feature (1)..(1950): Ortholog of  Ceres SEQ ID NO 15170764 as cited in SEQ ID NO 52602

SEQ ID NO: 113226 - protein, 598 aa, Arabidopsis thaliana; identical to SEQ ID NO: 101987
  peptide (1)..(598): Ceres Seq. ID no. 13609232

SEQ ID NO: 113227 - protein, 587 aa, Arabidopsis thaliana; identical to SEQ ID NO: 22173
  peptide (1)..(587): Ceres Seq. ID no. 13609233

SEQ ID NO: 113228 - protein, 585 aa, Arabidopsis thaliana; identical to SEQ ID NO: 22174
  peptide (1)..(585): Ceres Seq. ID no. 13609234

SEQ ID NO: 113229 - DNA, 1216 bp, Arabidopsis thaliana; identical to SEQ ID NO: 101990
  misc_feature (1)..(1216): Ceres Seq. ID no. 13609235
  misc_feature (1)..(1216): Ortholog of  Ceres SEQ ID NO 15170885 as cited in SEQ ID NO 54326

SEQ ID NO: 113230 - protein, 342 aa, Arabidopsis thaliana; identical to SEQ ID NO: 23731
  peptide (1)..(342): Ceres Seq. ID no. 13609236

SEQ ID NO: 113231 - protein, 283 aa, Arabidopsis thaliana; identical to SEQ ID NO: 23732
  peptide (1)..(283): Ceres Seq. ID no. 13609237

SEQ ID NO: 113232 - protein, 244 aa, Arabidopsis thaliana; identical to SEQ ID NO: 23733
  peptide (1)..(244): Ceres Seq. ID no. 13609238

SEQ ID NO: 113233 - DNA, 1256 bp, Arabidopsis thaliana; identical to SEQ ID NO: 101994
  misc_feature (1)..(1256): Ceres Seq. ID no. 13609239
  misc_feature (1)..(1256): Ortholog of  Ceres SEQ ID NO 15225196 as cited in SEQ ID NO 63947

SEQ ID NO: 113234 - protein, 346 aa, Arabidopsis thaliana; identical to SEQ ID NO: 35123
  peptide (1)..(346): Ceres Seq. ID no. 13609240

SEQ ID NO: 113235 - protein, 314 aa, Arabidopsis thaliana; identical to SEQ ID NO: 35124
  peptide (1)..(314): Ceres Seq. ID no. 13609241

SEQ ID NO: 113236 - DNA, 1975 bp, Arabidopsis thaliana; identical to SEQ ID NO: 101997
  misc_feature (1)..(1975): Ceres Seq. ID no. 13609242
  misc_feature (1)..(1975): Ortholog of  Ceres SEQ ID NO 13660287 as cited in SEQ ID NO 67316

SEQ ID NO: 113237 - protein, 104 aa, Arabidopsis thaliana; identical to SEQ ID NO: 101998
  peptide (1)..(104): Ceres Seq. ID no. 13609243

SEQ ID NO: 113238 - protein, 97 aa, Arabidopsis thaliana; identical to SEQ ID NO: 101999
  peptide (1)..(97): Ceres Seq. ID no. 13609244

SEQ ID NO: 113239 - protein, 75 aa, Arabidopsis thaliana; identical to SEQ ID NO: 102000
  peptide (1)..(75): Ceres Seq. ID no. 13609245

SEQ ID NO: 113240 - DNA, 1618 bp, Arabidopsis thaliana; identical to SEQ ID NO: 102001
  misc_feature (1)..(1618): Ceres Seq. ID no. 13609250
  misc_feature (1)..(1618): Ortholog of  Ceres SEQ ID NO 13594345 as cited in SEQ ID NO 58043
  misc_feature (1)..(1618): Ortholog of  Ceres SEQ ID NO 15168421 as cited in SEQ ID NO 60131
  misc_feature (1)..(1618): Ortholog of  Ceres SEQ ID NO 13597574 as cited in SEQ ID NO 64677
  misc_feature (1)..(1618): Ortholog of  Ceres SEQ ID NO 13597843 as cited in SEQ ID NO 64850
  misc_feature (1)..(1618): Ortholog of  Ceres SEQ ID NO 13597678 as cited in SEQ ID NO 65375
  misc_feature (1)..(1618): Ortholog of  Ceres SEQ ID NO 15176787 as cited in SEQ ID NO 66468
  misc_feature (1)..(1618): Ortholog of  Ceres SEQ ID NO 13596180 as cited in SEQ ID NO 67941
  misc_feature (1)..(1618): Ortholog of  Ceres SEQ ID NO 13591190 as cited in SEQ ID NO 68044
  misc_feature (1)..(1618): Ortholog of  Ceres SEQ ID NO 13595961 as cited in SEQ ID NO 68223

SEQ ID NO: 113241 - protein, 451 aa, Arabidopsis thaliana; identical to SEQ ID NO: 102002
  peptide (1)..(451): Ceres Seq. ID no. 13609251

SEQ ID NO: 113242 - protein, 432 aa, Arabidopsis thaliana; identical to SEQ ID NO: 102003
  peptide (1)..(432): Ceres Seq. ID no. 13609252

SEQ ID NO: 113243 - protein, 336 aa, Arabidopsis thaliana; identical to SEQ ID NO: 102004
  peptide (1)..(336): Ceres Seq. ID no. 13609253

SEQ ID NO: 113244 - DNA, 1537 bp, Arabidopsis thaliana; identical to SEQ ID NO: 102005
  misc_feature (1)..(1537): Ceres Seq. ID no. 13609254
  misc_feature (1)..(1537): Ortholog of  Ceres SEQ ID NO 15171430 as cited in SEQ ID NO 51500
  misc_feature (1)..(1537): Ortholog of  Ceres SEQ ID NO 15172476 as cited in SEQ ID NO 54945
  misc_feature (1)..(1537): Ortholog of  Ceres SEQ ID NO 15176106 as cited in SEQ ID NO 60324
  misc_feature (1)..(1537): Ortholog of  Ceres SEQ ID NO 13654989 as cited in SEQ ID NO 63117
  misc_feature (1)..(1537): Ortholog of  Ceres SEQ ID NO 13584744 as cited in SEQ ID NO 69137

SEQ ID NO: 113245 - protein, 389 aa, Arabidopsis thaliana; identical to SEQ ID NO: 20837
  peptide (1)..(389): Ceres Seq. ID no. 13609255

SEQ ID NO: 113246 - protein, 350 aa, Arabidopsis thaliana; identical to SEQ ID NO: 20838
  peptide (1)..(350): Ceres Seq. ID no. 13609256

SEQ ID NO: 113247 - protein, 236 aa, Arabidopsis thaliana; identical to SEQ ID NO: 20839
  peptide (1)..(236): Ceres Seq. ID no. 13609257

SEQ ID NO: 113248 - DNA, 1393 bp, Arabidopsis thaliana; identical to SEQ ID NO: 102009
  misc_feature (1)..(1393): Ceres Seq. ID no. 13609258
  misc_feature (1)..(1393): Ortholog of  Ceres SEQ ID NO 13654557 as cited in SEQ ID NO 68444

SEQ ID NO: 113249 - protein, 401 aa, Arabidopsis thaliana; identical to SEQ ID NO: 102010
  peptide (1)..(401): Ceres Seq. ID no. 13609259

SEQ ID NO: 113250 - protein, 388 aa, Arabidopsis thaliana; identical to SEQ ID NO: 36167
  peptide (1)..(388): Ceres Seq. ID no. 13609260

SEQ ID NO: 113251 - protein, 374 aa, Arabidopsis thaliana; identical to SEQ ID NO: 102012
  peptide (1)..(374): Ceres Seq. ID no. 13609261

SEQ ID NO: 113252 - DNA, 986 bp, Arabidopsis thaliana; identical to SEQ ID NO: 102013
  misc_feature (1)..(986): Ceres Seq. ID no. 13609262
  misc_feature (1)..(986): Ortholog of  Ceres SEQ ID NO 13594655 as cited in SEQ ID NO 51843
  misc_feature (1)..(986): Ortholog of  Ceres SEQ ID NO 13637562 as cited in SEQ ID NO 53674
  misc_feature (1)..(986): Ortholog of  Ceres SEQ ID NO 13595851 as cited in SEQ ID NO 56559
  misc_feature (1)..(986): Ortholog of  Ceres SEQ ID NO 15173454 as cited in SEQ ID NO 57898
  misc_feature (1)..(986): Ortholog of  Ceres SEQ ID NO 13598755 as cited in SEQ ID NO 69032

SEQ ID NO: 113253 - protein, 235 aa, Arabidopsis thaliana; identical to SEQ ID NO: 29141
  peptide (1)..(235): Ceres Seq. ID no. 13609263

SEQ ID NO: 113254 - DNA, 2641 bp, Arabidopsis thaliana; identical to SEQ ID NO: 102015
  misc_feature (1)..(2641): Ceres Seq. ID no. 13609266
  misc_feature (1)..(2641): Ortholog of  Ceres SEQ ID NO 15172609 as cited in SEQ ID NO 61938
  misc_feature (1)..(2641): Ortholog of  Ceres SEQ ID NO 13595870 as cited in SEQ ID NO 62101
  misc_feature (1)..(2641): Ortholog of  Ceres SEQ ID NO 13590241 as cited in SEQ ID NO 63878
  misc_feature (1)..(2641): Ortholog of  Ceres SEQ ID NO 13657939 as cited in SEQ ID NO 66349
  misc_feature (1)..(2641): Ortholog of  Ceres SEQ ID NO 13660597 as cited in SEQ ID NO 67655
  misc_feature (1)..(2641): Ortholog of  Ceres SEQ ID NO 13654484 as cited in SEQ ID NO 67717

SEQ ID NO: 113255 - protein, 810 aa, Arabidopsis thaliana; identical to SEQ ID NO: 42289
  peptide (1)..(810): Ceres Seq. ID no. 13609267

SEQ ID NO: 113256 - protein, 761 aa, Arabidopsis thaliana; identical to SEQ ID NO: 42290
  peptide (1)..(761): Ceres Seq. ID no. 13609268

SEQ ID NO: 113257 - protein, 723 aa, Arabidopsis thaliana; identical to SEQ ID NO: 42291
  peptide (1)..(723): Ceres Seq. ID no. 13609269

SEQ ID NO: 113258 - DNA, 1166 bp, Arabidopsis thaliana; identical to SEQ ID NO: 102019
  misc_feature (1)..(1166): Ceres Seq. ID no. 13609274
  misc_feature (1)..(1166): Ortholog of  Ceres SEQ ID NO 15177746 as cited in SEQ ID NO 57935

SEQ ID NO: 113259 - protein, 282 aa, Arabidopsis thaliana; identical to SEQ ID NO: 28728
  peptide (1)..(282): Ceres Seq. ID no. 13609275

SEQ ID NO: 113260 - protein, 260 aa, Arabidopsis thaliana; identical to SEQ ID NO: 28729
  peptide (1)..(260): Ceres Seq. ID no. 13609276

SEQ ID NO: 113261 - protein, 255 aa, Arabidopsis thaliana; identical to SEQ ID NO: 28730
  peptide (1)..(255): Ceres Seq. ID no. 13609277

SEQ ID NO: 113262 - DNA, 1528 bp, Arabidopsis thaliana; identical to SEQ ID NO: 102023
  misc_feature (1)..(1528): Ceres Seq. ID no. 13609285
  misc_feature (1)..(1528): Ortholog of  Ceres SEQ ID NO 13597740 as cited in SEQ ID NO 64482
  misc_feature (1)..(1528): Ortholog of  Ceres SEQ ID NO 13596056 as cited in SEQ ID NO 68307
  misc_feature (1)..(1528): Ortholog of  Ceres SEQ ID NO 12388689 as cited in SEQ ID NO 0

SEQ ID NO: 113263 - protein, 452 aa, Arabidopsis thaliana; identical to SEQ ID NO: 102024
  peptide (1)..(452): Ceres Seq. ID no. 13609286

SEQ ID NO: 113264 - protein, 426 aa, Arabidopsis thaliana; identical to SEQ ID NO: 43222
  peptide (1)..(426): Ceres Seq. ID no. 13609287

SEQ ID NO: 113265 - protein, 354 aa, Arabidopsis thaliana; identical to SEQ ID NO: 43223
  peptide (1)..(354): Ceres Seq. ID no. 13609288

SEQ ID NO: 113266 - DNA, 2494 bp, Arabidopsis thaliana; identical to SEQ ID NO: 102027
  misc_feature (1)..(2494): Ceres Seq. ID no. 13609289
  misc_feature (1)..(2494): Ortholog of  Ceres SEQ ID NO 13655755 as cited in SEQ ID NO 65117

SEQ ID NO: 113267 - protein, 784 aa, Arabidopsis thaliana; identical to SEQ ID NO: 102028
  peptide (1)..(784): Ceres Seq. ID no. 13609290

SEQ ID NO: 113268 - protein, 771 aa, Arabidopsis thaliana; identical to SEQ ID NO: 102029
  peptide (1)..(771): Ceres Seq. ID no. 13609291

SEQ ID NO: 113269 - protein, 761 aa, Arabidopsis thaliana; identical to SEQ ID NO: 102030
  peptide (1)..(761): Ceres Seq. ID no. 13609292

SEQ ID NO: 113270 - DNA, 1695 bp, Arabidopsis thaliana; identical to SEQ ID NO: 102031
  misc_feature (1)..(1695): Ceres Seq. ID no. 13609293
  misc_feature (1)..(1695): Ortholog of  Ceres SEQ ID NO 13596984 as cited in SEQ ID NO 63196

SEQ ID NO: 113271 - protein, 516 aa, Arabidopsis thaliana; identical to SEQ ID NO: 102032
  peptide (1)..(516): Ceres Seq. ID no. 13609294

SEQ ID NO: 113272 - protein, 493 aa, Arabidopsis thaliana; identical to SEQ ID NO: 75724
  peptide (1)..(493): Ceres Seq. ID no. 13609295

SEQ ID NO: 113273 - protein, 392 aa, Arabidopsis thaliana; identical to SEQ ID NO: 75725
  peptide (1)..(392): Ceres Seq. ID no. 13609296

SEQ ID NO: 113274 - DNA, 1244 bp, Arabidopsis thaliana; identical to SEQ ID NO: 102035
  misc_feature (1)..(1244): Ceres Seq. ID no. 13609302
  misc_feature (1)..(1244): Ortholog of  Ceres SEQ ID NO 13597376 as cited in SEQ ID NO 64002
  misc_feature (1)..(1244): Ortholog of  Ceres SEQ ID NO 13503573 as cited in SEQ ID NO 65402
  misc_feature (1)..(1244): Ortholog of  Ceres SEQ ID NO 13659615 as cited in SEQ ID NO 67248

SEQ ID NO: 113275 - protein, 411 aa, Arabidopsis thaliana; identical to SEQ ID NO: 102036
  peptide (1)..(411): Ceres Seq. ID no. 13609303

SEQ ID NO: 113276 - protein, 391 aa, Arabidopsis thaliana; identical to SEQ ID NO: 102037
  peptide (1)..(391): Ceres Seq. ID no. 13609304

SEQ ID NO: 113277 - protein, 379 aa, Arabidopsis thaliana; identical to SEQ ID NO: 72126
  peptide (1)..(379): Ceres Seq. ID no. 13609305

SEQ ID NO: 113278 - DNA, 1020 bp, Arabidopsis thaliana; identical to SEQ ID NO: 102039
  misc_feature (1)..(1020): Ceres Seq. ID no. 13609306
  misc_feature (1)..(1020): Ortholog of  Ceres SEQ ID NO 13593919 as cited in SEQ ID NO 54135
  misc_feature (1)..(1020): Ortholog of  Ceres SEQ ID NO 14303359 as cited in SEQ ID NO 54913
  misc_feature (1)..(1020): Ortholog of  Ceres SEQ ID NO 13596017 as cited in SEQ ID NO 62012

SEQ ID NO: 113279 - protein, 184 aa, Arabidopsis thaliana; identical to SEQ ID NO: 24508
  peptide (1)..(184): Ceres Seq. ID no. 13609307

SEQ ID NO: 113280 - protein, 170 aa, Arabidopsis thaliana; identical to SEQ ID NO: 24509
  peptide (1)..(170): Ceres Seq. ID no. 13609308

SEQ ID NO: 113281 - protein, 152 aa, Arabidopsis thaliana; identical to SEQ ID NO: 24510
  peptide (1)..(152): Ceres Seq. ID no. 13609309

SEQ ID NO: 113282 - DNA, 1128 bp, Arabidopsis thaliana; identical to SEQ ID NO: 102043
  misc_feature (1)..(1128): Ceres Seq. ID no. 13609321
  misc_feature (1)..(1128): Ortholog of  Ceres SEQ ID NO 14306066 as cited in SEQ ID NO 57378

SEQ ID NO: 113283 - protein, 263 aa, Arabidopsis thaliana; identical to SEQ ID NO: 30992
  peptide (1)..(263): Ceres Seq. ID no. 13609322

SEQ ID NO: 113284 - protein, 238 aa, Arabidopsis thaliana; identical to SEQ ID NO: 30993
  peptide (1)..(238): Ceres Seq. ID no. 13609323

SEQ ID NO: 113285 - protein, 234 aa, Arabidopsis thaliana; identical to SEQ ID NO: 30994
  peptide (1)..(234): Ceres Seq. ID no. 13609324

SEQ ID NO: 113286 - DNA, 851 bp, Arabidopsis thaliana; identical to SEQ ID NO: 102047
  misc_feature (1)..(851): Ceres Seq. ID no. 13609325
  misc_feature (1)..(851): Ortholog of  Ceres SEQ ID NO 13581804 as cited in SEQ ID NO 51424
  misc_feature (1)..(851): Ortholog of  Ceres SEQ ID NO 14310890 as cited in SEQ ID NO 54290
  misc_feature (1)..(851): Ortholog of  Ceres SEQ ID NO 13663874 as cited in SEQ ID NO 67003

SEQ ID NO: 113287 - protein, 246 aa, Arabidopsis thaliana; identical to SEQ ID NO: 102048
  peptide (1)..(246): Ceres Seq. ID no. 13609326

SEQ ID NO: 113288 - DNA, 2097 bp, Arabidopsis thaliana; identical to SEQ ID NO: 102049
  misc_feature (1)..(2097): Ceres Seq. ID no. 13609327
  misc_feature (1)..(2097): Ortholog of  Ceres SEQ ID NO 14310375 as cited in SEQ ID NO 59612

SEQ ID NO: 113289 - protein, 490 aa, Arabidopsis thaliana; identical to SEQ ID NO: 37591
  peptide (1)..(490): Ceres Seq. ID no. 13609328

SEQ ID NO: 113290 - protein, 480 aa, Arabidopsis thaliana; identical to SEQ ID NO: 37592
  peptide (1)..(480): Ceres Seq. ID no. 13609329

SEQ ID NO: 113291 - protein, 468 aa, Arabidopsis thaliana; identical to SEQ ID NO: 37593
  peptide (1)..(468): Ceres Seq. ID no. 13609330

SEQ ID NO: 113292 - DNA, 1163 bp, Arabidopsis thaliana; identical to SEQ ID NO: 102053
  misc_feature (1)..(1163): Ceres Seq. ID no. 13609349
  misc_feature (1)..(1163): Ortholog of  Ceres SEQ ID NO 13594548 as cited in SEQ ID NO 51267
  misc_feature (1)..(1163): Ortholog of  Ceres SEQ ID NO 12614847 as cited in SEQ ID NO 61970

SEQ ID NO: 113293 - protein, 244 aa, Arabidopsis thaliana; identical to SEQ ID NO: 25320
  peptide (1)..(244): Ceres Seq. ID no. 13609350

SEQ ID NO: 113294 - DNA, 1383 bp, Arabidopsis thaliana; identical to SEQ ID NO: 102055
  misc_feature (1)..(1383): Ceres Seq. ID no. 13609351
  misc_feature (1)..(1383): Ortholog of  Ceres SEQ ID NO 12636863 as cited in SEQ ID NO 0

SEQ ID NO: 113295 - protein, 398 aa, Arabidopsis thaliana; identical to SEQ ID NO: 40376
  peptide (1)..(398): Ceres Seq. ID no. 13609352

SEQ ID NO: 113296 - protein, 389 aa, Arabidopsis thaliana; identical to SEQ ID NO: 40377
  peptide (1)..(389): Ceres Seq. ID no. 13609353

SEQ ID NO: 113297 - protein, 373 aa, Arabidopsis thaliana; identical to SEQ ID NO: 40378
  peptide (1)..(373): Ceres Seq. ID no. 13609354

SEQ ID NO: 113298 - DNA, 1217 bp, Arabidopsis thaliana; identical to SEQ ID NO: 102059
  misc_feature (1)..(1217): Ceres Seq. ID no. 13609355
  misc_feature (1)..(1217): Ortholog of  Ceres SEQ ID NO 12484482 as cited in SEQ ID NO 53324

SEQ ID NO: 113299 - protein, 345 aa, Arabidopsis thaliana; identical to SEQ ID NO: 102060
  peptide (1)..(345): Ceres Seq. ID no. 13609356

SEQ ID NO: 113300 - protein, 321 aa, Arabidopsis thaliana; identical to SEQ ID NO: 26654
  peptide (1)..(321): Ceres Seq. ID no. 13609357

SEQ ID NO: 113301 - protein, 248 aa, Arabidopsis thaliana; identical to SEQ ID NO: 26655
  peptide (1)..(248): Ceres Seq. ID no. 13609358

SEQ ID NO: 113302 - DNA, 1885 bp, Arabidopsis thaliana; identical to SEQ ID NO: 102063
  misc_feature (1)..(1885): Ceres Seq. ID no. 13609359
  misc_feature (1)..(1885): Ortholog of  Ceres SEQ ID NO 13596509 as cited in SEQ ID NO 62004
  misc_feature (1)..(1885): Ortholog of  Ceres SEQ ID NO 13659971 as cited in SEQ ID NO 67565
  misc_feature (1)..(1885): Ortholog of  Ceres SEQ ID NO 13500385 as cited in SEQ ID NO 67583

SEQ ID NO: 113303 - protein, 444 aa, Arabidopsis thaliana; identical to SEQ ID NO: 102064
  peptide (1)..(444): Ceres Seq. ID no. 13609360

SEQ ID NO: 113304 - protein, 430 aa, Arabidopsis thaliana; identical to SEQ ID NO: 102065
  peptide (1)..(430): Ceres Seq. ID no. 13609361

SEQ ID NO: 113305 - protein, 371 aa, Arabidopsis thaliana; identical to SEQ ID NO: 102066
  peptide (1)..(371): Ceres Seq. ID no. 13609362

SEQ ID NO: 113306 - DNA, 1282 bp, Arabidopsis thaliana; identical to SEQ ID NO: 102067
  misc_feature (1)..(1282): Ceres Seq. ID no. 13609363
  misc_feature (1)..(1282): Ortholog of  Ceres SEQ ID NO 14309116 as cited in SEQ ID NO 0

SEQ ID NO: 113307 - protein, 366 aa, Arabidopsis thaliana; identical to SEQ ID NO: 102068
  peptide (1)..(366): Ceres Seq. ID no. 13609364

SEQ ID NO: 113308 - protein, 355 aa, Arabidopsis thaliana; identical to SEQ ID NO: 102069
  peptide (1)..(355): Ceres Seq. ID no. 13609365

SEQ ID NO: 113309 - protein, 354 aa, Arabidopsis thaliana; identical to SEQ ID NO: 102070
  peptide (1)..(354): Ceres Seq. ID no. 13609366

SEQ ID NO: 113310 - DNA, 1852 bp, Arabidopsis thaliana; identical to SEQ ID NO: 102071
  misc_feature (1)..(1852): Ceres Seq. ID no. 13609367
  misc_feature (1)..(1852): Ortholog of  Ceres SEQ ID NO 15176579 as cited in SEQ ID NO 54513

SEQ ID NO: 113311 - protein, 589 aa, Arabidopsis thaliana; identical to SEQ ID NO: 102072
  peptide (1)..(589): Ceres Seq. ID no. 13609368

SEQ ID NO: 113312 - protein, 569 aa, Arabidopsis thaliana; identical to SEQ ID NO: 102073
  peptide (1)..(569): Ceres Seq. ID no. 13609369

SEQ ID NO: 113313 - protein, 548 aa, Arabidopsis thaliana; identical to SEQ ID NO: 102074
  peptide (1)..(548): Ceres Seq. ID no. 13609370

SEQ ID NO: 113314 - DNA, 597 bp, Arabidopsis thaliana; identical to SEQ ID NO: 102075
  misc_feature (1)..(597): Ceres Seq. ID no. 13609371
  misc_feature (1)..(597): Ortholog of  Ceres SEQ ID NO 12321778 as cited in SEQ ID NO 20535

SEQ ID NO: 113315 - protein, 114 aa, Arabidopsis thaliana; identical to SEQ ID NO: 102076
  peptide (1)..(114): Ceres Seq. ID no. 13609372

SEQ ID NO: 113316 - protein, 96 aa, Arabidopsis thaliana; identical to SEQ ID NO: 20537
  peptide (1)..(96): Ceres Seq. ID no. 13609373

SEQ ID NO: 113317 - protein, 94 aa, Arabidopsis thaliana; identical to SEQ ID NO: 20538
  peptide (1)..(94): Ceres Seq. ID no. 13609374

SEQ ID NO: 113318 - protein, 89 aa, Arabidopsis thaliana; identical to SEQ ID NO: 102079
  peptide (1)..(89): Ceres Seq. ID no. 13609375

SEQ ID NO: 113319 - DNA, 1189 bp, Arabidopsis thaliana; identical to SEQ ID NO: 102080
  misc_feature (1)..(1189): Ceres Seq. ID no. 13609404
  misc_feature (1)..(1189): Ortholog of  Ceres SEQ ID NO 14316451 as cited in SEQ ID NO 57956
  misc_feature (1)..(1189): Ortholog of  Ceres SEQ ID NO 15224799 as cited in SEQ ID NO 0

SEQ ID NO: 113320 - protein, 351 aa, Arabidopsis thaliana; identical to SEQ ID NO: 29410
  peptide (1)..(351): Ceres Seq. ID no. 13609405

SEQ ID NO: 113321 - protein, 348 aa, Arabidopsis thaliana; identical to SEQ ID NO: 29411
  peptide (1)..(348): Ceres Seq. ID no. 13609406

SEQ ID NO: 113322 - protein, 273 aa, Arabidopsis thaliana; identical to SEQ ID NO: 29412
  peptide (1)..(273): Ceres Seq. ID no. 13609407

SEQ ID NO: 113323 - DNA, 1590 bp, Arabidopsis thaliana; identical to SEQ ID NO: 102084
  misc_feature (1)..(1590): Ceres Seq. ID no. 13609408
  misc_feature (1)..(1590): Ortholog of  Ceres SEQ ID NO 13502874 as cited in SEQ ID NO 66298
  misc_feature (1)..(1590): Ortholog of  Ceres SEQ ID NO 12614124 as cited in SEQ ID NO 68392

SEQ ID NO: 113324 - protein, 529 aa, Arabidopsis thaliana; identical to SEQ ID NO: 102085
  peptide (1)..(529): Ceres Seq. ID no. 13609409

SEQ ID NO: 113325 - protein, 523 aa, Arabidopsis thaliana; identical to SEQ ID NO: 79638
  peptide (1)..(523): Ceres Seq. ID no. 13609410

SEQ ID NO: 113326 - protein, 509 aa, Arabidopsis thaliana; identical to SEQ ID NO: 79639
  peptide (1)..(509): Ceres Seq. ID no. 13609411

SEQ ID NO: 113327 - DNA, 924 bp, Arabidopsis thaliana; identical to SEQ ID NO: 102088
  misc_feature (1)..(924): Ceres Seq. ID no. 13609412
  misc_feature (1)..(924): Ortholog of  Ceres SEQ ID NO 12610385 as cited in SEQ ID NO 55938
  misc_feature (1)..(924): Ortholog of  Ceres SEQ ID NO 13661939 as cited in SEQ ID NO 61170
  misc_feature (1)..(924): Ortholog of  Ceres SEQ ID NO 14309041 as cited in SEQ ID NO 0
  misc_feature (1)..(924): Ortholog of  Ceres SEQ ID NO 14309611 as cited in SEQ ID NO 0

SEQ ID NO: 113328 - protein, 168 aa, Arabidopsis thaliana; identical to SEQ ID NO: 35636
  peptide (1)..(168): Ceres Seq. ID no. 13609413

SEQ ID NO: 113329 - protein, 137 aa, Arabidopsis thaliana; identical to SEQ ID NO: 35637
  peptide (1)..(137): Ceres Seq. ID no. 13609414

SEQ ID NO: 113330 - protein, 103 aa, Arabidopsis thaliana; identical to SEQ ID NO: 102091
  peptide (1)..(103): Ceres Seq. ID no. 13609415

SEQ ID NO: 113331 - DNA, 1256 bp, Arabidopsis thaliana; identical to SEQ ID NO: 102092
  misc_feature (1)..(1256): Ceres Seq. ID no. 13609416
  misc_feature (1)..(1256): Ortholog of  Ceres SEQ ID NO 14306059 as cited in SEQ ID NO 52249
  misc_feature (1)..(1256): Ortholog of  Ceres SEQ ID NO 15170479 as cited in SEQ ID NO 52835
  misc_feature (1)..(1256): Ortholog of  Ceres SEQ ID NO 13596087 as cited in SEQ ID NO 68336

SEQ ID NO: 113332 - protein, 303 aa, Arabidopsis thaliana; identical to SEQ ID NO: 102093
  peptide (1)..(303): Ceres Seq. ID no. 13609417

SEQ ID NO: 113333 - protein, 177 aa, Arabidopsis thaliana; identical to SEQ ID NO: 26159
  peptide (1)..(177): Ceres Seq. ID no. 13609418

SEQ ID NO: 113334 - protein, 175 aa, Arabidopsis thaliana; identical to SEQ ID NO: 26160
  peptide (1)..(175): Ceres Seq. ID no. 13609419

SEQ ID NO: 113335 - DNA, 1171 bp, Arabidopsis thaliana; identical to SEQ ID NO: 102096
  misc_feature (1)..(1171): Ceres Seq. ID no. 13609420
  misc_feature (1)..(1171): Ortholog of  Ceres SEQ ID NO 14310358 as cited in SEQ ID NO 54582
  misc_feature (1)..(1171): Ortholog of  Ceres SEQ ID NO 15176085 as cited in SEQ ID NO 69305

SEQ ID NO: 113336 - protein, 323 aa, Arabidopsis thaliana; identical to SEQ ID NO: 102097
  peptide (1)..(323): Ceres Seq. ID no. 13609421

SEQ ID NO: 113337 - protein, 303 aa, Arabidopsis thaliana; identical to SEQ ID NO: 102098
  peptide (1)..(303): Ceres Seq. ID no. 13609422

SEQ ID NO: 113338 - DNA, 2014 bp, Arabidopsis thaliana; identical to SEQ ID NO: 102099
  misc_feature (1)..(2014): Ceres Seq. ID no. 13609423
  misc_feature (1)..(2014): Ortholog of  Ceres SEQ ID NO 14312408 as cited in SEQ ID NO 55042

SEQ ID NO: 113339 - protein, 572 aa, Arabidopsis thaliana; identical to SEQ ID NO: 102100
  peptide (1)..(572): Ceres Seq. ID no. 13609424

SEQ ID NO: 113340 - protein, 571 aa, Arabidopsis thaliana; identical to SEQ ID NO: 102101
  peptide (1)..(571): Ceres Seq. ID no. 13609425

SEQ ID NO: 113341 - protein, 539 aa, Arabidopsis thaliana; identical to SEQ ID NO: 102102
  peptide (1)..(539): Ceres Seq. ID no. 13609426

SEQ ID NO: 113342 - DNA, 1299 bp, Arabidopsis thaliana; identical to SEQ ID NO: 102103
  misc_feature (1)..(1299): Ceres Seq. ID no. 13609430
  misc_feature (1)..(1299): Ortholog of  Ceres SEQ ID NO 13594604 as cited in SEQ ID NO 52106

SEQ ID NO: 113343 - protein, 291 aa, Arabidopsis thaliana; identical to SEQ ID NO: 34881
  peptide (1)..(291): Ceres Seq. ID no. 13609431

SEQ ID NO: 113344 - DNA, 1486 bp, Arabidopsis thaliana; identical to SEQ ID NO: 102105
  misc_feature (1)..(1486): Ceres Seq. ID no. 13609442
  misc_feature (1)..(1486): Ortholog of  Ceres SEQ ID NO 15176851 as cited in SEQ ID NO 61348

SEQ ID NO: 113345 - protein, 436 aa, Arabidopsis thaliana; identical to SEQ ID NO: 46225
  peptide (1)..(436): Ceres Seq. ID no. 13609443

SEQ ID NO: 113346 - protein, 399 aa, Arabidopsis thaliana; identical to SEQ ID NO: 46226
  peptide (1)..(399): Ceres Seq. ID no. 13609444

SEQ ID NO: 113347 - protein, 350 aa, Arabidopsis thaliana; identical to SEQ ID NO: 46227
  peptide (1)..(350): Ceres Seq. ID no. 13609445

SEQ ID NO: 113348 - DNA, 1345 bp, Arabidopsis thaliana; identical to SEQ ID NO: 102109
  misc_feature (1)..(1345): Ceres Seq. ID no. 13609446
  misc_feature (1)..(1345): Ortholog of  Ceres SEQ ID NO 15225196 as cited in SEQ ID NO 63947

SEQ ID NO: 113349 - protein, 346 aa, Arabidopsis thaliana; identical to SEQ ID NO: 24066
  peptide (1)..(346): Ceres Seq. ID no. 13609447

SEQ ID NO: 113350 - protein, 314 aa, Arabidopsis thaliana; identical to SEQ ID NO: 24067
  peptide (1)..(314): Ceres Seq. ID no. 13609448

SEQ ID NO: 113351 - DNA, 1093 bp, Arabidopsis thaliana; identical to SEQ ID NO: 102112
  misc_feature (1)..(1093): Ceres Seq. ID no. 13609449
  misc_feature (1)..(1093): Ortholog of  Ceres SEQ ID NO 13639109 as cited in SEQ ID NO 51131
  misc_feature (1)..(1093): Ortholog of  Ceres SEQ ID NO 13596346 as cited in SEQ ID NO 60879
  misc_feature (1)..(1093): Ortholog of  Ceres SEQ ID NO 15178104 as cited in SEQ ID NO 0

SEQ ID NO: 113352 - protein, 274 aa, Arabidopsis thaliana; identical to SEQ ID NO: 22484
  peptide (1)..(274): Ceres Seq. ID no. 13609450

SEQ ID NO: 113353 - protein, 263 aa, Arabidopsis thaliana; identical to SEQ ID NO: 22485
  peptide (1)..(263): Ceres Seq. ID no. 13609451

SEQ ID NO: 113354 - protein, 261 aa, Arabidopsis thaliana; identical to SEQ ID NO: 22486
  peptide (1)..(261): Ceres Seq. ID no. 13609452

SEQ ID NO: 113355 - DNA, 1583 bp, Arabidopsis thaliana; identical to SEQ ID NO: 102116
  misc_feature (1)..(1583): Ceres Seq. ID no. 13609453
  misc_feature (1)..(1583): Ortholog of  Ceres SEQ ID NO 13594209 as cited in SEQ ID NO 59089
  misc_feature (1)..(1583): Ortholog of  Ceres SEQ ID NO 13502874 as cited in SEQ ID NO 66298
  misc_feature (1)..(1583): Ortholog of  Ceres SEQ ID NO 12614124 as cited in SEQ ID NO 68392

SEQ ID NO: 113356 - protein, 503 aa, Arabidopsis thaliana; identical to SEQ ID NO: 102117
  peptide (1)..(503): Ceres Seq. ID no. 13609454

SEQ ID NO: 113357 - protein, 490 aa, Arabidopsis thaliana; identical to SEQ ID NO: 23084
  peptide (1)..(490): Ceres Seq. ID no. 13609455

SEQ ID NO: 113358 - protein, 368 aa, Arabidopsis thaliana; identical to SEQ ID NO: 23085
  peptide (1)..(368): Ceres Seq. ID no. 13609456

SEQ ID NO: 113359 - DNA, 1311 bp, Arabidopsis thaliana; identical to SEQ ID NO: 102120
  misc_feature (1)..(1311): Ceres Seq. ID no. 13609465
  misc_feature (1)..(1311): Ortholog of  Ceres SEQ ID NO 14308107 as cited in SEQ ID NO 59030
  misc_feature (1)..(1311): Ortholog of  Ceres SEQ ID NO 15226612 as cited in SEQ ID NO 62700

SEQ ID NO: 113360 - protein, 384 aa, Arabidopsis thaliana; identical to SEQ ID NO: 21333
  peptide (1)..(384): Ceres Seq. ID no. 13609466

SEQ ID NO: 113361 - protein, 369 aa, Arabidopsis thaliana; identical to SEQ ID NO: 21334
  peptide (1)..(369): Ceres Seq. ID no. 13609467

SEQ ID NO: 113362 - protein, 294 aa, Arabidopsis thaliana; identical to SEQ ID NO: 21335
  peptide (1)..(294): Ceres Seq. ID no. 13609468

SEQ ID NO: 113363 - DNA, 1102 bp, Arabidopsis thaliana; identical to SEQ ID NO: 102124
  misc_feature (1)..(1102): Ceres Seq. ID no. 13609469
  misc_feature (1)..(1102): Ortholog of  Ceres SEQ ID NO 15179139 as cited in SEQ ID NO 1093
  misc_feature (1)..(1102): Ortholog of  Ceres SEQ ID NO 15226793 as cited in SEQ ID NO 58689

SEQ ID NO: 113364 - protein, 254 aa, Arabidopsis thaliana; identical to SEQ ID NO: 35412
  peptide (1)..(254): Ceres Seq. ID no. 13609470

SEQ ID NO: 113365 - protein, 252 aa, Arabidopsis thaliana; identical to SEQ ID NO: 35413
  peptide (1)..(252): Ceres Seq. ID no. 13609471

SEQ ID NO: 113366 - protein, 242 aa, Arabidopsis thaliana; identical to SEQ ID NO: 35414
  peptide (1)..(242): Ceres Seq. ID no. 13609472

SEQ ID NO: 113367 - DNA, 1306 bp, Arabidopsis thaliana; identical to SEQ ID NO: 102128
  misc_feature (1)..(1306): Ceres Seq. ID no. 13609477
  misc_feature (1)..(1306): Ortholog of  Ceres SEQ ID NO 15179641 as cited in SEQ ID NO 56414
  misc_feature (1)..(1306): Ortholog of  Ceres SEQ ID NO 14313252 as cited in SEQ ID NO 67134
  misc_feature (1)..(1306): Ortholog of  Ceres SEQ ID NO 14302220 as cited in SEQ ID NO 69121

SEQ ID NO: 113368 - protein, 361 aa, Arabidopsis thaliana; identical to SEQ ID NO: 102129
  peptide (1)..(361): Ceres Seq. ID no. 13609478

SEQ ID NO: 113369 - protein, 338 aa, Arabidopsis thaliana; identical to SEQ ID NO: 22717
  peptide (1)..(338): Ceres Seq. ID no. 13609479

SEQ ID NO: 113370 - protein, 294 aa, Arabidopsis thaliana; identical to SEQ ID NO: 22718
  peptide (1)..(294): Ceres Seq. ID no. 13609480

SEQ ID NO: 113371 - DNA, 1870 bp, Arabidopsis thaliana; identical to SEQ ID NO: 102132
  misc_feature (1)..(1870): Ceres Seq. ID no. 13609481
  misc_feature (1)..(1870): Ortholog of  Ceres SEQ ID NO 13599322 as cited in SEQ ID NO 0

SEQ ID NO: 113372 - protein, 492 aa, Arabidopsis thaliana; identical to SEQ ID NO: 102133
  peptide (1)..(492): Ceres Seq. ID no. 13609482

SEQ ID NO: 113373 - protein, 350 aa, Arabidopsis thaliana; identical to SEQ ID NO: 102134
  peptide (1)..(350): Ceres Seq. ID no. 13609483

SEQ ID NO: 113374 - protein, 319 aa, Arabidopsis thaliana; identical to SEQ ID NO: 102135
  peptide (1)..(319): Ceres Seq. ID no. 13609484

SEQ ID NO: 113375 - DNA, 2411 bp, Arabidopsis thaliana; identical to SEQ ID NO: 102136
  misc_feature (1)..(2411): Ceres Seq. ID no. 13609489
  misc_feature (1)..(2411): Ortholog of  Ceres SEQ ID NO 15177678 as cited in SEQ ID NO 0

SEQ ID NO: 113376 - protein, 622 aa, Arabidopsis thaliana; identical to SEQ ID NO: 39992
  peptide (1)..(622): Ceres Seq. ID no. 13609490

SEQ ID NO: 113377 - protein, 620 aa, Arabidopsis thaliana; identical to SEQ ID NO: 39993
  peptide (1)..(620): Ceres Seq. ID no. 13609491

SEQ ID NO: 113378 - protein, 603 aa, Arabidopsis thaliana; identical to SEQ ID NO: 39994
  peptide (1)..(603): Ceres Seq. ID no. 13609492

SEQ ID NO: 113379 - DNA, 1774 bp, Arabidopsis thaliana; identical to SEQ ID NO: 102140
  misc_feature (1)..(1774): Ceres Seq. ID no. 13609500
  misc_feature (1)..(1774): Ortholog of  Ceres SEQ ID NO 14314620 as cited in SEQ ID NO 56872

SEQ ID NO: 113380 - protein, 428 aa, Arabidopsis thaliana; identical to SEQ ID NO: 102141
  peptide (1)..(428): Ceres Seq. ID no. 13609501

SEQ ID NO: 113381 - protein, 376 aa, Arabidopsis thaliana; identical to SEQ ID NO: 102142
  peptide (1)..(376): Ceres Seq. ID no. 13609502

SEQ ID NO: 113382 - protein, 362 aa, Arabidopsis thaliana; identical to SEQ ID NO: 102143
  peptide (1)..(362): Ceres Seq. ID no. 13609503

SEQ ID NO: 113383 - DNA, 1135 bp, Arabidopsis thaliana; identical to SEQ ID NO: 102144
  misc_feature (1)..(1135): Ceres Seq. ID no. 13609525
  misc_feature (1)..(1135): Ortholog of  Ceres SEQ ID NO 12612330 as cited in SEQ ID NO 56418
  misc_feature (1)..(1135): Ortholog of  Ceres SEQ ID NO 13664295 as cited in SEQ ID NO 61486
  misc_feature (1)..(1135): Ortholog of  Ceres SEQ ID NO 15179147 as cited in SEQ ID NO 0

SEQ ID NO: 113384 - protein, 310 aa, Arabidopsis thaliana; identical to SEQ ID NO: 37403
  peptide (1)..(310): Ceres Seq. ID no. 13609526

SEQ ID NO: 113385 - protein, 269 aa, Arabidopsis thaliana; identical to SEQ ID NO: 37404
  peptide (1)..(269): Ceres Seq. ID no. 13609527

SEQ ID NO: 113386 - DNA, 1101 bp, Arabidopsis thaliana; identical to SEQ ID NO: 102147
  misc_feature (1)..(1101): Ceres Seq. ID no. 13609528
  misc_feature (1)..(1101): Ortholog of  Ceres SEQ ID NO 13594209 as cited in SEQ ID NO 59089
  misc_feature (1)..(1101): Ortholog of  Ceres SEQ ID NO 13502874 as cited in SEQ ID NO 66298

SEQ ID NO: 113387 - protein, 310 aa, Arabidopsis thaliana; identical to SEQ ID NO: 102148
  peptide (1)..(310): Ceres Seq. ID no. 13609529

SEQ ID NO: 113388 - protein, 266 aa, Arabidopsis thaliana; identical to SEQ ID NO: 102149
  peptide (1)..(266): Ceres Seq. ID no. 13609530

SEQ ID NO: 113389 - protein, 251 aa, Arabidopsis thaliana; identical to SEQ ID NO: 102150
  peptide (1)..(251): Ceres Seq. ID no. 13609531

SEQ ID NO: 113390 - DNA, 1402 bp, Arabidopsis thaliana; identical to SEQ ID NO: 102151
  misc_feature (1)..(1402): Ceres Seq. ID no. 13609546
  misc_feature (1)..(1402): Ortholog of  Ceres SEQ ID NO 14316017 as cited in SEQ ID NO 67028

SEQ ID NO: 113391 - protein, 297 aa, Arabidopsis thaliana; identical to SEQ ID NO: 102152
  peptide (1)..(297): Ceres Seq. ID no. 13609547

SEQ ID NO: 113392 - protein, 293 aa, Arabidopsis thaliana; identical to SEQ ID NO: 102153
  peptide (1)..(293): Ceres Seq. ID no. 13609548

SEQ ID NO: 113393 - protein, 290 aa, Arabidopsis thaliana; identical to SEQ ID NO: 102154
  peptide (1)..(290): Ceres Seq. ID no. 13609549

SEQ ID NO: 113394 - DNA, 975 bp, Arabidopsis thaliana; identical to SEQ ID NO: 102155
  misc_feature (1)..(975): Ceres Seq. ID no. 13609550
  misc_feature (1)..(975): Ortholog of  Ceres SEQ ID NO 15174082 as cited in SEQ ID NO 61896
  misc_feature (1)..(975): Ortholog of  Ceres SEQ ID NO 13655598 as cited in SEQ ID NO 64077

SEQ ID NO: 113395 - protein, 250 aa, Arabidopsis thaliana; identical to SEQ ID NO: 38676
  peptide (1)..(250): Ceres Seq. ID no. 13609551

SEQ ID NO: 113396 - DNA, 1183 bp, Arabidopsis thaliana; identical to SEQ ID NO: 102157
  misc_feature (1)..(1183): Ceres Seq. ID no. 13609552
  misc_feature (1)..(1183): Ortholog of  Ceres SEQ ID NO 14302919 as cited in SEQ ID NO 20338
  misc_feature (1)..(1183): Ortholog of  Ceres SEQ ID NO 13595497 as cited in SEQ ID NO 51127
  misc_feature (1)..(1183): Ortholog of  Ceres SEQ ID NO 14314046 as cited in SEQ ID NO 59316

SEQ ID NO: 113397 - protein, 282 aa, Arabidopsis thaliana; identical to SEQ ID NO: 22674
  peptide (1)..(282): Ceres Seq. ID no. 13609553

SEQ ID NO: 113398 - protein, 281 aa, Arabidopsis thaliana; identical to SEQ ID NO: 22675
  peptide (1)..(281): Ceres Seq. ID no. 13609554

SEQ ID NO: 113399 - protein, 280 aa, Arabidopsis thaliana; identical to SEQ ID NO: 22676
  peptide (1)..(280): Ceres Seq. ID no. 13609555

SEQ ID NO: 113400 - DNA, 1127 bp, Arabidopsis thaliana; identical to SEQ ID NO: 102161
  misc_feature (1)..(1127): Ceres Seq. ID no. 13609560
  misc_feature (1)..(1127): Ortholog of  Ceres SEQ ID NO 14311579 as cited in SEQ ID NO 51717

SEQ ID NO: 113401 - protein, 304 aa, Arabidopsis thaliana; identical to SEQ ID NO: 36652
  peptide (1)..(304): Ceres Seq. ID no. 13609561

SEQ ID NO: 113402 - protein, 232 aa, Arabidopsis thaliana; identical to SEQ ID NO: 36653
  peptide (1)..(232): Ceres Seq. ID no. 13609562

SEQ ID NO: 113403 - protein, 216 aa, Arabidopsis thaliana; identical to SEQ ID NO: 36654
  peptide (1)..(216): Ceres Seq. ID no. 13609563

SEQ ID NO: 113404 - DNA, 2815 bp, Arabidopsis thaliana; identical to SEQ ID NO: 102165
  misc_feature (1)..(2815): Ceres Seq. ID no. 13609564
  misc_feature (1)..(2815): Ortholog of  Ceres SEQ ID NO 13598023 as cited in SEQ ID NO 66487

SEQ ID NO: 113405 - protein, 374 aa, Arabidopsis thaliana; identical to SEQ ID NO: 102166
  peptide (1)..(374): Ceres Seq. ID no. 13609565

SEQ ID NO: 113406 - protein, 257 aa, Arabidopsis thaliana; identical to SEQ ID NO: 102167
  peptide (1)..(257): Ceres Seq. ID no. 13609566

SEQ ID NO: 113407 - protein, 238 aa, Arabidopsis thaliana; identical to SEQ ID NO: 102168
  peptide (1)..(238): Ceres Seq. ID no. 13609567

SEQ ID NO: 113408 - DNA, 995 bp, Arabidopsis thaliana; identical to SEQ ID NO: 102169
  misc_feature (1)..(995): Ceres Seq. ID no. 13609583
  misc_feature (1)..(995): Ortholog of  Ceres SEQ ID NO 13589868 as cited in SEQ ID NO 55521
  misc_feature (1)..(995): Ortholog of  Ceres SEQ ID NO 14312250 as cited in SEQ ID NO 59168
  misc_feature (1)..(995): Ortholog of  Ceres SEQ ID NO 15173326 as cited in SEQ ID NO 63793
  misc_feature (1)..(995): Ortholog of  Ceres SEQ ID NO 12617659 as cited in SEQ ID NO 65286
  misc_feature (1)..(995): Ortholog of  Ceres SEQ ID NO 15179979 as cited in SEQ ID NO 0

SEQ ID NO: 113409 - protein, 181 aa, Arabidopsis thaliana; identical to SEQ ID NO: 22739
  peptide (1)..(181): Ceres Seq. ID no. 13609584

SEQ ID NO: 113410 - protein, 164 aa, Arabidopsis thaliana; identical to SEQ ID NO: 22740
  peptide (1)..(164): Ceres Seq. ID no. 13609585

SEQ ID NO: 113411 - protein, 160 aa, Arabidopsis thaliana; identical to SEQ ID NO: 22741
  peptide (1)..(160): Ceres Seq. ID no. 13609586

SEQ ID NO: 113412 - DNA, 1295 bp, Arabidopsis thaliana; identical to SEQ ID NO: 102173
  misc_feature (1)..(1295): Ceres Seq. ID no. 13609587
  misc_feature (1)..(1295): Ortholog of  Ceres SEQ ID NO 15169248 as cited in SEQ ID NO 55022
  misc_feature (1)..(1295): Ortholog of  Ceres SEQ ID NO 14315042 as cited in SEQ ID NO 56959
  misc_feature (1)..(1295): Ortholog of  Ceres SEQ ID NO 12608620 as cited in SEQ ID NO 60192
  misc_feature (1)..(1295): Ortholog of  Ceres SEQ ID NO 15173077 as cited in SEQ ID NO 64566
  misc_feature (1)..(1295): Ortholog of  Ceres SEQ ID NO 13662898 as cited in SEQ ID NO 66199

SEQ ID NO: 113413 - protein, 236 aa, Arabidopsis thaliana; identical to SEQ ID NO: 36395
  peptide (1)..(236): Ceres Seq. ID no. 13609588

SEQ ID NO: 113414 - protein, 225 aa, Arabidopsis thaliana; identical to SEQ ID NO: 36396
  peptide (1)..(225): Ceres Seq. ID no. 13609589

SEQ ID NO: 113415 - protein, 204 aa, Arabidopsis thaliana; identical to SEQ ID NO: 36397
  peptide (1)..(204): Ceres Seq. ID no. 13609590

SEQ ID NO: 113416 - DNA, 1407 bp, Arabidopsis thaliana; identical to SEQ ID NO: 102177
  misc_feature (1)..(1407): Ceres Seq. ID no. 13609597
  misc_feature (1)..(1407): Ortholog of  Ceres SEQ ID NO 15179955 as cited in SEQ ID NO 0

SEQ ID NO: 113417 - protein, 288 aa, Arabidopsis thaliana; identical to SEQ ID NO: 29768
  peptide (1)..(288): Ceres Seq. ID no. 13609598

SEQ ID NO: 113418 - protein, 191 aa, Arabidopsis thaliana; identical to SEQ ID NO: 29769
  peptide (1)..(191): Ceres Seq. ID no. 13609599

SEQ ID NO: 113419 - protein, 187 aa, Arabidopsis thaliana; identical to SEQ ID NO: 29770
  peptide (1)..(187): Ceres Seq. ID no. 13609600

SEQ ID NO: 113420 - DNA, 879 bp, Arabidopsis thaliana; identical to SEQ ID NO: 102181
  misc_feature (1)..(879): Ceres Seq. ID no. 13609601
  misc_feature (1)..(879): Ortholog of  Ceres SEQ ID NO 13662677 as cited in SEQ ID NO 63824

SEQ ID NO: 113421 - protein, 175 aa, Arabidopsis thaliana; identical to SEQ ID NO: 35281
  peptide (1)..(175): Ceres Seq. ID no. 13609602

SEQ ID NO: 113422 - protein, 106 aa, Arabidopsis thaliana; identical to SEQ ID NO: 35282
  peptide (1)..(106): Ceres Seq. ID no. 13609603

SEQ ID NO: 113423 - DNA, 1068 bp, Arabidopsis thaliana; identical to SEQ ID NO: 102184
  misc_feature (1)..(1068): Ceres Seq. ID no. 13609604
  misc_feature (1)..(1068): Ortholog of  Ceres SEQ ID NO 12609177 as cited in SEQ ID NO 55753
  misc_feature (1)..(1068): Ortholog of  Ceres SEQ ID NO 12609935 as cited in SEQ ID NO 55757
  misc_feature (1)..(1068): Ortholog of  Ceres SEQ ID NO 13594206 as cited in SEQ ID NO 59075
  misc_feature (1)..(1068): Ortholog of  Ceres SEQ ID NO 13654038 as cited in SEQ ID NO 69261
  misc_feature (1)..(1068): Ortholog of  Ceres SEQ ID NO 14309346 as cited in SEQ ID NO 0

SEQ ID NO: 113424 - protein, 176 aa, Arabidopsis thaliana; identical to SEQ ID NO: 22693
  peptide (1)..(176): Ceres Seq. ID no. 13609605

SEQ ID NO: 113425 - protein, 105 aa, Arabidopsis thaliana; identical to SEQ ID NO: 22694
  peptide (1)..(105): Ceres Seq. ID no. 13609606

SEQ ID NO: 113426 - DNA, 1169 bp, Arabidopsis thaliana; identical to SEQ ID NO: 102187
  misc_feature (1)..(1169): Ceres Seq. ID no. 13609620
  misc_feature (1)..(1169): Ortholog of  Ceres SEQ ID NO 15170609 as cited in SEQ ID NO 52683

SEQ ID NO: 113427 - protein, 347 aa, Arabidopsis thaliana; identical to SEQ ID NO: 102188
  peptide (1)..(347): Ceres Seq. ID no. 13609621

SEQ ID NO: 113428 - protein, 340 aa, Arabidopsis thaliana; identical to SEQ ID NO: 102189
  peptide (1)..(340): Ceres Seq. ID no. 13609622

SEQ ID NO: 113429 - protein, 227 aa, Arabidopsis thaliana; identical to SEQ ID NO: 23346
  peptide (1)..(227): Ceres Seq. ID no. 13609623

SEQ ID NO: 113430 - DNA, 1042 bp, Arabidopsis thaliana; identical to SEQ ID NO: 102191
  misc_feature (1)..(1042): Ceres Seq. ID no. 13609632
  misc_feature (1)..(1042): Ortholog of  Ceres SEQ ID NO 13594298 as cited in SEQ ID NO 57803
  misc_feature (1)..(1042): Ortholog of  Ceres SEQ ID NO 13503476 as cited in SEQ ID NO 61978
  misc_feature (1)..(1042): Ortholog of  Ceres SEQ ID NO 12578438 as cited in SEQ ID NO 62201
  misc_feature (1)..(1042): Ortholog of  Ceres SEQ ID NO 12617675 as cited in SEQ ID NO 64656

SEQ ID NO: 113431 - protein, 313 aa, Arabidopsis thaliana; identical to SEQ ID NO: 102192
  peptide (1)..(313): Ceres Seq. ID no. 13609633

SEQ ID NO: 113432 - protein, 310 aa, Arabidopsis thaliana; identical to SEQ ID NO: 102193
  peptide (1)..(310): Ceres Seq. ID no. 13609634

SEQ ID NO: 113433 - protein, 307 aa, Arabidopsis thaliana; identical to SEQ ID NO: 102194
  peptide (1)..(307): Ceres Seq. ID no. 13609635

SEQ ID NO: 113434 - DNA, 1578 bp, Arabidopsis thaliana; identical to SEQ ID NO: 102195
  misc_feature (1)..(1578): Ceres Seq. ID no. 13609636
  misc_feature (1)..(1578): Ortholog of  Ceres SEQ ID NO 14304000 as cited in SEQ ID NO 53798
  misc_feature (1)..(1578): Ortholog of  Ceres SEQ ID NO 14303568 as cited in SEQ ID NO 65364

SEQ ID NO: 113435 - protein, 433 aa, Arabidopsis thaliana; identical to SEQ ID NO: 102196
  peptide (1)..(433): Ceres Seq. ID no. 13609637

SEQ ID NO: 113436 - protein, 429 aa, Arabidopsis thaliana; identical to SEQ ID NO: 21038
  peptide (1)..(429): Ceres Seq. ID no. 13609638

SEQ ID NO: 113437 - protein, 242 aa, Arabidopsis thaliana; identical to SEQ ID NO: 21039
  peptide (1)..(242): Ceres Seq. ID no. 13609639

SEQ ID NO: 113438 - DNA, 1404 bp, Arabidopsis thaliana; identical to SEQ ID NO: 102199
  misc_feature (1)..(1404): Ceres Seq. ID no. 13609659
  misc_feature (1)..(1404): Ortholog of  Ceres SEQ ID NO 14311407 as cited in SEQ ID NO 54067
  misc_feature (1)..(1404): Ortholog of  Ceres SEQ ID NO 14313107 as cited in SEQ ID NO 58915
  misc_feature (1)..(1404): Ortholog of  Ceres SEQ ID NO 15226556 as cited in SEQ ID NO 67908

SEQ ID NO: 113439 - protein, 321 aa, Arabidopsis thaliana; identical to SEQ ID NO: 25506
  peptide (1)..(321): Ceres Seq. ID no. 13609660

SEQ ID NO: 113440 - protein, 320 aa, Arabidopsis thaliana; identical to SEQ ID NO: 25507
  peptide (1)..(320): Ceres Seq. ID no. 13609661

SEQ ID NO: 113441 - protein, 239 aa, Arabidopsis thaliana; identical to SEQ ID NO: 25508
  peptide (1)..(239): Ceres Seq. ID no. 13609662

SEQ ID NO: 113442 - DNA, 1824 bp, Arabidopsis thaliana; identical to SEQ ID NO: 102203
  misc_feature (1)..(1824): Ceres Seq. ID no. 13609682
  misc_feature (1)..(1824): Ortholog of  Ceres SEQ ID NO 13594037 as cited in SEQ ID NO 55666
  misc_feature (1)..(1824): Ortholog of  Ceres SEQ ID NO 13657707 as cited in SEQ ID NO 66407

SEQ ID NO: 113443 - protein, 568 aa, Arabidopsis thaliana; identical to SEQ ID NO: 102204
  peptide (1)..(568): Ceres Seq. ID no. 13609683

SEQ ID NO: 113444 - protein, 557 aa, Arabidopsis thaliana; identical to SEQ ID NO: 22605
  peptide (1)..(557): Ceres Seq. ID no. 13609684

SEQ ID NO: 113445 - protein, 454 aa, Arabidopsis thaliana; identical to SEQ ID NO: 22606
  peptide (1)..(454): Ceres Seq. ID no. 13609685

SEQ ID NO: 113446 - DNA, 1771 bp, Arabidopsis thaliana; identical to SEQ ID NO: 102207
  misc_feature (1)..(1771): Ceres Seq. ID no. 13609686
  misc_feature (1)..(1771): Ortholog of  Ceres SEQ ID NO 14311183 as cited in SEQ ID NO 58495
  misc_feature (1)..(1771): Ortholog of  Ceres SEQ ID NO 13502874 as cited in SEQ ID NO 66298
  misc_feature (1)..(1771): Ortholog of  Ceres SEQ ID NO 12614124 as cited in SEQ ID NO 68392

SEQ ID NO: 113447 - protein, 536 aa, Arabidopsis thaliana; identical to SEQ ID NO: 40997
  peptide (1)..(536): Ceres Seq. ID no. 13609687

SEQ ID NO: 113448 - protein, 510 aa, Arabidopsis thaliana; identical to SEQ ID NO: 40998
  peptide (1)..(510): Ceres Seq. ID no. 13609688

SEQ ID NO: 113449 - protein, 449 aa, Arabidopsis thaliana; identical to SEQ ID NO: 40999
  peptide (1)..(449): Ceres Seq. ID no. 13609689

SEQ ID NO: 113450 - DNA, 1173 bp, Arabidopsis thaliana; identical to SEQ ID NO: 102211
  misc_feature (1)..(1173): Ceres Seq. ID no. 13609694
  misc_feature (1)..(1173): Ortholog of  Ceres SEQ ID NO 13582332 as cited in SEQ ID NO 59890
  misc_feature (1)..(1173): Ortholog of  Ceres SEQ ID NO 13598278 as cited in SEQ ID NO 68456

SEQ ID NO: 113451 - protein, 390 aa, Arabidopsis thaliana; identical to SEQ ID NO: 102212
  peptide (1)..(390): Ceres Seq. ID no. 13609695

SEQ ID NO: 113452 - DNA, 1190 bp, Arabidopsis thaliana; identical to SEQ ID NO: 102213
  misc_feature (1)..(1190): Ceres Seq. ID no. 13609719
  misc_feature (1)..(1190): Ortholog of  Ceres SEQ ID NO 13582388 as cited in SEQ ID NO 56812
  misc_feature (1)..(1190): Ortholog of  Ceres SEQ ID NO 14305353 as cited in SEQ ID NO 57710

SEQ ID NO: 113453 - protein, 240 aa, Arabidopsis thaliana; identical to SEQ ID NO: 29436
  peptide (1)..(240): Ceres Seq. ID no. 13609720

SEQ ID NO: 113454 - protein, 212 aa, Arabidopsis thaliana; identical to SEQ ID NO: 29437
  peptide (1)..(212): Ceres Seq. ID no. 13609721

SEQ ID NO: 113455 - protein, 144 aa, Arabidopsis thaliana; identical to SEQ ID NO: 29438
  peptide (1)..(144): Ceres Seq. ID no. 13609722

SEQ ID NO: 113456 - DNA, 1254 bp, Arabidopsis thaliana; identical to SEQ ID NO: 102217
  misc_feature (1)..(1254): Ceres Seq. ID no. 13609733
  misc_feature (1)..(1254): Ortholog of  Ceres SEQ ID NO 14313074 as cited in SEQ ID NO 59199
  misc_feature (1)..(1254): Ortholog of  Ceres SEQ ID NO 13655506 as cited in SEQ ID NO 64493

SEQ ID NO: 113457 - protein, 332 aa, Arabidopsis thaliana; identical to SEQ ID NO: 102218
  peptide (1)..(332): Ceres Seq. ID no. 13609734

SEQ ID NO: 113458 - protein, 199 aa, Arabidopsis thaliana; identical to SEQ ID NO: 102219
  peptide (1)..(199): Ceres Seq. ID no. 13609735

SEQ ID NO: 113459 - DNA, 777 bp, Arabidopsis thaliana; identical to SEQ ID NO: 102220
  misc_feature (1)..(777): Ceres Seq. ID no. 13609746
  misc_feature (1)..(777): Ortholog of  Ceres SEQ ID NO 14309373 as cited in SEQ ID NO 0

SEQ ID NO: 113460 - protein, 197 aa, Arabidopsis thaliana; identical to SEQ ID NO: 39014
  peptide (1)..(197): Ceres Seq. ID no. 13609747

SEQ ID NO: 113461 - protein, 175 aa, Arabidopsis thaliana; identical to SEQ ID NO: 39015
  peptide (1)..(175): Ceres Seq. ID no. 13609748

SEQ ID NO: 113462 - protein, 167 aa, Arabidopsis thaliana; identical to SEQ ID NO: 39016
  peptide (1)..(167): Ceres Seq. ID no. 13609749

SEQ ID NO: 113463 - DNA, 1293 bp, Arabidopsis thaliana; identical to SEQ ID NO: 102224
  misc_feature (1)..(1293): Ceres Seq. ID no. 13609750
  misc_feature (1)..(1293): Ortholog of  Ceres SEQ ID NO 13659644 as cited in SEQ ID NO 67118
  misc_feature (1)..(1293): Ortholog of  Ceres SEQ ID NO 14302856 as cited in SEQ ID NO 68824

SEQ ID NO: 113464 - protein, 358 aa, Arabidopsis thaliana; identical to SEQ ID NO: 28449
  peptide (1)..(358): Ceres Seq. ID no. 13609751

SEQ ID NO: 113465 - protein, 347 aa, Arabidopsis thaliana; identical to SEQ ID NO: 28450
  peptide (1)..(347): Ceres Seq. ID no. 13609752

SEQ ID NO: 113466 - protein, 341 aa, Arabidopsis thaliana; identical to SEQ ID NO: 28451
  peptide (1)..(341): Ceres Seq. ID no. 13609753

SEQ ID NO: 113467 - DNA, 1593 bp, Arabidopsis thaliana; identical to SEQ ID NO: 102228
  misc_feature (1)..(1593): Ceres Seq. ID no. 13609767
  misc_feature (1)..(1593): Ortholog of  Ceres SEQ ID NO 14311535 as cited in SEQ ID NO 51559
  misc_feature (1)..(1593): Ortholog of  Ceres SEQ ID NO 15176200 as cited in SEQ ID NO 55188

SEQ ID NO: 113468 - protein, 471 aa, Arabidopsis thaliana; identical to SEQ ID NO: 102229
  peptide (1)..(471): Ceres Seq. ID no. 13609768

SEQ ID NO: 113469 - protein, 455 aa, Arabidopsis thaliana; identical to SEQ ID NO: 77464
  peptide (1)..(455): Ceres Seq. ID no. 13609769

SEQ ID NO: 113470 - protein, 409 aa, Arabidopsis thaliana; identical to SEQ ID NO: 77465
  peptide (1)..(409): Ceres Seq. ID no. 13609770

SEQ ID NO: 113471 - DNA, 1296 bp, Arabidopsis thaliana; identical to SEQ ID NO: 102232
  misc_feature (1)..(1296): Ceres Seq. ID no. 13609771
  misc_feature (1)..(1296): Ortholog of  Ceres SEQ ID NO 13647395 as cited in SEQ ID NO 20370

SEQ ID NO: 113472 - protein, 406 aa, Arabidopsis thaliana; identical to SEQ ID NO: 102233
  peptide (1)..(406): Ceres Seq. ID no. 13609772

SEQ ID NO: 113473 - protein, 396 aa, Arabidopsis thaliana; identical to SEQ ID NO: 102234
  peptide (1)..(396): Ceres Seq. ID no. 13609773

SEQ ID NO: 113474 - protein, 391 aa, Arabidopsis thaliana; identical to SEQ ID NO: 102235
  peptide (1)..(391): Ceres Seq. ID no. 13609774

SEQ ID NO: 113475 - DNA, 1139 bp, Arabidopsis thaliana; identical to SEQ ID NO: 102236
  misc_feature (1)..(1139): Ceres Seq. ID no. 13609779
  misc_feature (1)..(1139): Ortholog of  Ceres SEQ ID NO 15175048 as cited in SEQ ID NO 59975
  misc_feature (1)..(1139): Ortholog of  Ceres SEQ ID NO 13597333 as cited in SEQ ID NO 63974
  misc_feature (1)..(1139): Ortholog of  Ceres SEQ ID NO 13599307 as cited in SEQ ID NO 0
  misc_feature (1)..(1139): Ortholog of  Ceres SEQ ID NO 15179517 as cited in SEQ ID NO 0

SEQ ID NO: 113476 - protein, 271 aa, Arabidopsis thaliana; identical to SEQ ID NO: 22328
  peptide (1)..(271): Ceres Seq. ID no. 13609780

SEQ ID NO: 113477 - protein, 187 aa, Arabidopsis thaliana; identical to SEQ ID NO: 22329
  peptide (1)..(187): Ceres Seq. ID no. 13609781

SEQ ID NO: 113478 - protein, 183 aa, Arabidopsis thaliana; identical to SEQ ID NO: 22330
  peptide (1)..(183): Ceres Seq. ID no. 13609782

SEQ ID NO: 113479 - DNA, 1014 bp, Arabidopsis thaliana; identical to SEQ ID NO: 102240
  misc_feature (1)..(1014): Ceres Seq. ID no. 13609794
  misc_feature (1)..(1014): Ortholog of  Ceres SEQ ID NO 14308320 as cited in SEQ ID NO 59093
  misc_feature (1)..(1014): Ortholog of  Ceres SEQ ID NO 12590628 as cited in SEQ ID NO 0

SEQ ID NO: 113480 - protein, 265 aa, Arabidopsis thaliana; identical to SEQ ID NO: 102241
  peptide (1)..(265): Ceres Seq. ID no. 13609795

SEQ ID NO: 113481 - protein, 255 aa, Arabidopsis thaliana; identical to SEQ ID NO: 102242
  peptide (1)..(255): Ceres Seq. ID no. 13609796

SEQ ID NO: 113482 - protein, 240 aa, Arabidopsis thaliana; identical to SEQ ID NO: 102243
  peptide (1)..(240): Ceres Seq. ID no. 13609797

SEQ ID NO: 113483 - DNA, 1531 bp, Arabidopsis thaliana; identical to SEQ ID NO: 102244
  misc_feature (1)..(1531): Ceres Seq. ID no. 13609798
  misc_feature (1)..(1531): Ortholog of  Ceres SEQ ID NO 15173355 as cited in SEQ ID NO 61844

SEQ ID NO: 113484 - protein, 439 aa, Arabidopsis thaliana; identical to SEQ ID NO: 102245
  peptide (1)..(439): Ceres Seq. ID no. 13609799

SEQ ID NO: 113485 - protein, 383 aa, Arabidopsis thaliana; identical to SEQ ID NO: 43231
  peptide (1)..(383): Ceres Seq. ID no. 13609800

SEQ ID NO: 113486 - protein, 294 aa, Arabidopsis thaliana; identical to SEQ ID NO: 43232
  peptide (1)..(294): Ceres Seq. ID no. 13609801

SEQ ID NO: 113487 - DNA, 1761 bp, Arabidopsis thaliana; identical to SEQ ID NO: 102248
  misc_feature (1)..(1761): Ceres Seq. ID no. 13609817
  misc_feature (1)..(1761): Ortholog of  Ceres SEQ ID NO 14307257 as cited in SEQ ID NO 54628

SEQ ID NO: 113488 - protein, 493 aa, Arabidopsis thaliana; identical to SEQ ID NO: 40482
  peptide (1)..(493): Ceres Seq. ID no. 13609818

SEQ ID NO: 113489 - protein, 409 aa, Arabidopsis thaliana; identical to SEQ ID NO: 40483
  peptide (1)..(409): Ceres Seq. ID no. 13609819

SEQ ID NO: 113490 - protein, 376 aa, Arabidopsis thaliana; identical to SEQ ID NO: 40484
  peptide (1)..(376): Ceres Seq. ID no. 13609820

SEQ ID NO: 113491 - DNA, 2491 bp, Arabidopsis thaliana; identical to SEQ ID NO: 102252
  misc_feature (1)..(2491): Ceres Seq. ID no. 13609821
  misc_feature (1)..(2491): Ortholog of  Ceres SEQ ID NO 15170768 as cited in SEQ ID NO 52641

SEQ ID NO: 113492 - protein, 712 aa, Arabidopsis thaliana; identical to SEQ ID NO: 102253
  peptide (1)..(712): Ceres Seq. ID no. 13609822

SEQ ID NO: 113493 - protein, 659 aa, Arabidopsis thaliana; identical to SEQ ID NO: 102254
  peptide (1)..(659): Ceres Seq. ID no. 13609823

SEQ ID NO: 113494 - protein, 629 aa, Arabidopsis thaliana; identical to SEQ ID NO: 102255
  peptide (1)..(629): Ceres Seq. ID no. 13609824

SEQ ID NO: 113495 - DNA, 966 bp, Arabidopsis thaliana; identical to SEQ ID NO: 102256
  misc_feature (1)..(966): Ceres Seq. ID no. 13609833
  misc_feature (1)..(966): Ortholog of  Ceres SEQ ID NO 15226909 as cited in SEQ ID NO 61336
  misc_feature (1)..(966): Ortholog of  Ceres SEQ ID NO 15179474 as cited in SEQ ID NO 0

SEQ ID NO: 113496 - protein, 137 aa, Arabidopsis thaliana; identical to SEQ ID NO: 102257
  peptide (1)..(137): Ceres Seq. ID no. 13609834

SEQ ID NO: 113497 - protein, 93 aa, Arabidopsis thaliana; identical to SEQ ID NO: 102258
  peptide (1)..(93): Ceres Seq. ID no. 13609835

SEQ ID NO: 113498 - protein, 87 aa, Arabidopsis thaliana; identical to SEQ ID NO: 27228
  peptide (1)..(87): Ceres Seq. ID no. 13609836

SEQ ID NO: 113499 - DNA, 681 bp, Arabidopsis thaliana; identical to SEQ ID NO: 102260
  misc_feature (1)..(681): Ceres Seq. ID no. 13609837
  misc_feature (1)..(681): Ortholog of  Ceres SEQ ID NO 12608513 as cited in SEQ ID NO 58090

SEQ ID NO: 113500 - protein, 176 aa, Arabidopsis thaliana; identical to SEQ ID NO: 102261
  peptide (1)..(176): Ceres Seq. ID no. 13609838

SEQ ID NO: 113501 - protein, 164 aa, Arabidopsis thaliana; identical to SEQ ID NO: 102262
  peptide (1)..(164): Ceres Seq. ID no. 13609839

SEQ ID NO: 113502 - protein, 143 aa, Arabidopsis thaliana; identical to SEQ ID NO: 36943
  peptide (1)..(143): Ceres Seq. ID no. 13609840

SEQ ID NO: 113503 - DNA, 811 bp, Arabidopsis thaliana; identical to SEQ ID NO: 102264
  misc_feature (1)..(811): Ceres Seq. ID no. 13609847
  misc_feature (1)..(811): Ortholog of  Ceres SEQ ID NO 14304408 as cited in SEQ ID NO 58051
  misc_feature (1)..(811): Ortholog of  Ceres SEQ ID NO 13661769 as cited in SEQ ID NO 61435
  misc_feature (1)..(811): Ortholog of  Ceres SEQ ID NO 13600585 as cited in SEQ ID NO 0

SEQ ID NO: 113504 - protein, 225 aa, Arabidopsis thaliana; identical to SEQ ID NO: 102265
  peptide (1)..(225): Ceres Seq. ID no. 13609848

SEQ ID NO: 113505 - protein, 195 aa, Arabidopsis thaliana; identical to SEQ ID NO: 102266
  peptide (1)..(195): Ceres Seq. ID no. 13609849

SEQ ID NO: 113506 - protein, 166 aa, Arabidopsis thaliana; identical to SEQ ID NO: 102267
  peptide (1)..(166): Ceres Seq. ID no. 13609850

SEQ ID NO: 113507 - DNA, 1398 bp, Arabidopsis thaliana; identical to SEQ ID NO: 102268
  misc_feature (1)..(1398): Ceres Seq. ID no. 13609851
  misc_feature (1)..(1398): Ortholog of  Ceres SEQ ID NO 13598253 as cited in SEQ ID NO 62412

SEQ ID NO: 113508 - protein, 341 aa, Arabidopsis thaliana; identical to SEQ ID NO: 36191
  peptide (1)..(341): Ceres Seq. ID no. 13609852

SEQ ID NO: 113509 - protein, 266 aa, Arabidopsis thaliana; identical to SEQ ID NO: 36192
  peptide (1)..(266): Ceres Seq. ID no. 13609853

SEQ ID NO: 113510 - protein, 245 aa, Arabidopsis thaliana; identical to SEQ ID NO: 36193
  peptide (1)..(245): Ceres Seq. ID no. 13609854

SEQ ID NO: 113511 - DNA, 1311 bp, Arabidopsis thaliana; identical to SEQ ID NO: 102272
  misc_feature (1)..(1311): Ceres Seq. ID no. 13609859
  misc_feature (1)..(1311): Ortholog of  Ceres SEQ ID NO 13655992 as cited in SEQ ID NO 65504
  misc_feature (1)..(1311): Ortholog of  Ceres SEQ ID NO 13587581 as cited in SEQ ID NO 0

SEQ ID NO: 113512 - protein, 374 aa, Arabidopsis thaliana; identical to SEQ ID NO: 102273
  peptide (1)..(374): Ceres Seq. ID no. 13609860

SEQ ID NO: 113513 - protein, 336 aa, Arabidopsis thaliana; identical to SEQ ID NO: 102274
  peptide (1)..(336): Ceres Seq. ID no. 13609861

SEQ ID NO: 113514 - protein, 243 aa, Arabidopsis thaliana; identical to SEQ ID NO: 75472
  peptide (1)..(243): Ceres Seq. ID no. 13609862

SEQ ID NO: 113515 - DNA, 1599 bp, Arabidopsis thaliana; identical to SEQ ID NO: 102276
  misc_feature (1)..(1599): Ceres Seq. ID no. 13609867
  misc_feature (1)..(1599): Ortholog of  Ceres SEQ ID NO 15176002 as cited in SEQ ID NO 55243

SEQ ID NO: 113516 - protein, 439 aa, Arabidopsis thaliana; identical to SEQ ID NO: 23813
  peptide (1)..(439): Ceres Seq. ID no. 13609868

SEQ ID NO: 113517 - protein, 433 aa, Arabidopsis thaliana; identical to SEQ ID NO: 23814
  peptide (1)..(433): Ceres Seq. ID no. 13609869

SEQ ID NO: 113518 - protein, 404 aa, Arabidopsis thaliana; identical to SEQ ID NO: 23815
  peptide (1)..(404): Ceres Seq. ID no. 13609870

SEQ ID NO: 113519 - DNA, 804 bp, Arabidopsis thaliana; identical to SEQ ID NO: 102280
  misc_feature (1)..(804): Ceres Seq. ID no. 13609871
  misc_feature (1)..(804): Ortholog of  Ceres SEQ ID NO 13594870 as cited in SEQ ID NO 51929
  misc_feature (1)..(804): Ortholog of  Ceres SEQ ID NO 12610679 as cited in SEQ ID NO 56077
  misc_feature (1)..(804): Ortholog of  Ceres SEQ ID NO 12635481 as cited in SEQ ID NO 0

SEQ ID NO: 113520 - protein, 138 aa, Arabidopsis thaliana; identical to SEQ ID NO: 35594
  peptide (1)..(138): Ceres Seq. ID no. 13609872

SEQ ID NO: 113521 - DNA, 731 bp, Arabidopsis thaliana; identical to SEQ ID NO: 102282
  misc_feature (1)..(731): Ceres Seq. ID no. 13609873
  misc_feature (1)..(731): Ortholog of  Ceres SEQ ID NO 13594870 as cited in SEQ ID NO 51929
  misc_feature (1)..(731): Ortholog of  Ceres SEQ ID NO 12610679 as cited in SEQ ID NO 56077
  misc_feature (1)..(731): Ortholog of  Ceres SEQ ID NO 12635481 as cited in SEQ ID NO 0

SEQ ID NO: 113522 - protein, 158 aa, Arabidopsis thaliana; identical to SEQ ID NO: 102283
  peptide (1)..(158): Ceres Seq. ID no. 13609874

SEQ ID NO: 113523 - protein, 138 aa, Arabidopsis thaliana; identical to SEQ ID NO: 35594
  peptide (1)..(138): Ceres Seq. ID no. 13609875

SEQ ID NO: 113524 - DNA, 1496 bp, Arabidopsis thaliana; identical to SEQ ID NO: 102285
  misc_feature (1)..(1496): Ceres Seq. ID no. 13609884
  misc_feature (1)..(1496): Ortholog of  Ceres SEQ ID NO 13597334 as cited in SEQ ID NO 64244

SEQ ID NO: 113525 - protein, 461 aa, Arabidopsis thaliana; identical to SEQ ID NO: 102286
  peptide (1)..(461): Ceres Seq. ID no. 13609885

SEQ ID NO: 113526 - protein, 415 aa, Arabidopsis thaliana; identical to SEQ ID NO: 24820
  peptide (1)..(415): Ceres Seq. ID no. 13609886

SEQ ID NO: 113527 - protein, 403 aa, Arabidopsis thaliana; identical to SEQ ID NO: 24821
  peptide (1)..(403): Ceres Seq. ID no. 13609887

SEQ ID NO: 113528 - DNA, 937 bp, Arabidopsis thaliana; identical to SEQ ID NO: 102289
  misc_feature (1)..(937): Ceres Seq. ID no. 13609888
  misc_feature (1)..(937): Ortholog of  Ceres SEQ ID NO 13583408 as cited in SEQ ID NO 62616
  misc_feature (1)..(937): Ortholog of  Ceres SEQ ID NO 15179752 as cited in SEQ ID NO 63074

SEQ ID NO: 113529 - protein, 267 aa, Arabidopsis thaliana; identical to SEQ ID NO: 97854
  peptide (1)..(267): Ceres Seq. ID no. 13609889

SEQ ID NO: 113530 - protein, 242 aa, Arabidopsis thaliana; identical to SEQ ID NO: 23649
  peptide (1)..(242): Ceres Seq. ID no. 13609890

SEQ ID NO: 113531 - DNA, 1369 bp, Arabidopsis thaliana; identical to SEQ ID NO: 102292
  misc_feature (1)..(1369): Ceres Seq. ID no. 13609891
  misc_feature (1)..(1369): Ortholog of  Ceres SEQ ID NO 13598368 as cited in SEQ ID NO 62140

SEQ ID NO: 113532 - protein, 447 aa, Arabidopsis thaliana; identical to SEQ ID NO: 102293
  peptide (1)..(447): Ceres Seq. ID no. 13609892

SEQ ID NO: 113533 - protein, 357 aa, Arabidopsis thaliana; identical to SEQ ID NO: 72106
  peptide (1)..(357): Ceres Seq. ID no. 13609893

SEQ ID NO: 113534 - protein, 265 aa, Arabidopsis thaliana; identical to SEQ ID NO: 72107
  peptide (1)..(265): Ceres Seq. ID no. 13609894

SEQ ID NO: 113535 - DNA, 1299 bp, Arabidopsis thaliana; identical to SEQ ID NO: 102296
  misc_feature (1)..(1299): Ceres Seq. ID no. 13609902
  misc_feature (1)..(1299): Ortholog of  Ceres SEQ ID NO 15171268 as cited in SEQ ID NO 51297
  misc_feature (1)..(1299): Ortholog of  Ceres SEQ ID NO 15170521 as cited in SEQ ID NO 55668
  misc_feature (1)..(1299): Ortholog of  Ceres SEQ ID NO 13598249 as cited in SEQ ID NO 62509
  misc_feature (1)..(1299): Ortholog of  Ceres SEQ ID NO 13598595 as cited in SEQ ID NO 64671
  misc_feature (1)..(1299): Ortholog of  Ceres SEQ ID NO 13654241 as cited in SEQ ID NO 68348

SEQ ID NO: 113536 - protein, 282 aa, Arabidopsis thaliana; identical to SEQ ID NO: 102297
  peptide (1)..(282): Ceres Seq. ID no. 13609903

SEQ ID NO: 113537 - protein, 272 aa, Arabidopsis thaliana; identical to SEQ ID NO: 102298
  peptide (1)..(272): Ceres Seq. ID no. 13609904

SEQ ID NO: 113538 - DNA, 1237 bp, Arabidopsis thaliana; identical to SEQ ID NO: 102299
  misc_feature (1)..(1237): Ceres Seq. ID no. 13609940
  misc_feature (1)..(1237): Ortholog of  Ceres SEQ ID NO 13581947 as cited in SEQ ID NO 51812

SEQ ID NO: 113539 - protein, 186 aa, Arabidopsis thaliana; identical to SEQ ID NO: 102300
  peptide (1)..(186): Ceres Seq. ID no. 13609941

SEQ ID NO: 113540 - protein, 139 aa, Arabidopsis thaliana; identical to SEQ ID NO: 102301
  peptide (1)..(139): Ceres Seq. ID no. 13609942

SEQ ID NO: 113541 - protein, 116 aa, Arabidopsis thaliana; identical to SEQ ID NO: 102302
  peptide (1)..(116): Ceres Seq. ID no. 13609943

SEQ ID NO: 113542 - DNA, 1677 bp, Arabidopsis thaliana; identical to SEQ ID NO: 102303
  misc_feature (1)..(1677): Ceres Seq. ID no. 13609944
  misc_feature (1)..(1677): Ortholog of  Ceres SEQ ID NO 13596935 as cited in SEQ ID NO 63031
  misc_feature (1)..(1677): Ortholog of  Ceres SEQ ID NO 15179123 as cited in SEQ ID NO 0

SEQ ID NO: 113543 - protein, 508 aa, Arabidopsis thaliana; identical to SEQ ID NO: 102304
  peptide (1)..(508): Ceres Seq. ID no. 13609945

SEQ ID NO: 113544 - protein, 384 aa, Arabidopsis thaliana; identical to SEQ ID NO: 71298
  peptide (1)..(384): Ceres Seq. ID no. 13609946

SEQ ID NO: 113545 - protein, 340 aa, Arabidopsis thaliana; identical to SEQ ID NO: 102306
  peptide (1)..(340): Ceres Seq. ID no. 13609947

SEQ ID NO: 113546 - DNA, 1202 bp, Arabidopsis thaliana; identical to SEQ ID NO: 102307
  misc_feature (1)..(1202): Ceres Seq. ID no. 13609948
  misc_feature (1)..(1202): Ortholog of  Ceres SEQ ID NO 14313666 as cited in SEQ ID NO 54618
  misc_feature (1)..(1202): Ortholog of  Ceres SEQ ID NO 13595351 as cited in SEQ ID NO 55934
  misc_feature (1)..(1202): Ortholog of  Ceres SEQ ID NO 13639645 as cited in SEQ ID NO 57488

SEQ ID NO: 113547 - protein, 347 aa, Arabidopsis thaliana; identical to SEQ ID NO: 102308
  peptide (1)..(347): Ceres Seq. ID no. 13609949

SEQ ID NO: 113548 - protein, 327 aa, Arabidopsis thaliana; identical to SEQ ID NO: 102309
  peptide (1)..(327): Ceres Seq. ID no. 13609950

SEQ ID NO: 113549 - protein, 218 aa, Arabidopsis thaliana; identical to SEQ ID NO: 102310
  peptide (1)..(218): Ceres Seq. ID no. 13609951

SEQ ID NO: 113550 - DNA, 978 bp, Arabidopsis thaliana; identical to SEQ ID NO: 102311
  misc_feature (1)..(978): Ceres Seq. ID no. 13609952
  misc_feature (1)..(978): Ortholog of  Ceres SEQ ID NO 13639246 as cited in SEQ ID NO 56576

SEQ ID NO: 113551 - protein, 235 aa, Arabidopsis thaliana; identical to SEQ ID NO: 102312
  peptide (1)..(235): Ceres Seq. ID no. 13609953

SEQ ID NO: 113552 - protein, 221 aa, Arabidopsis thaliana; identical to SEQ ID NO: 102313
  peptide (1)..(221): Ceres Seq. ID no. 13609954

SEQ ID NO: 113553 - protein, 162 aa, Arabidopsis thaliana; identical to SEQ ID NO: 102314
  peptide (1)..(162): Ceres Seq. ID no. 13609955

SEQ ID NO: 113554 - DNA, 2145 bp, Arabidopsis thaliana; identical to SEQ ID NO: 102315
  misc_feature (1)..(2145): Ceres Seq. ID no. 13609956
  misc_feature (1)..(2145): Ortholog of  Ceres SEQ ID NO 15171762 as cited in SEQ ID NO 57846
  misc_feature (1)..(2145): Ortholog of  Ceres SEQ ID NO 12597287 as cited in SEQ ID NO 63982

SEQ ID NO: 113555 - protein, 363 aa, Arabidopsis thaliana; identical to SEQ ID NO: 102316
  peptide (1)..(363): Ceres Seq. ID no. 13609957

SEQ ID NO: 113556 - protein, 223 aa, Arabidopsis thaliana; identical to SEQ ID NO: 102317
  peptide (1)..(223): Ceres Seq. ID no. 13609958

SEQ ID NO: 113557 - DNA, 1161 bp, Arabidopsis thaliana; identical to SEQ ID NO: 102318
  misc_feature (1)..(1161): Ceres Seq. ID no. 13609977
  misc_feature (1)..(1161): Ortholog of  Ceres SEQ ID NO 12612330 as cited in SEQ ID NO 56418
  misc_feature (1)..(1161): Ortholog of  Ceres SEQ ID NO 13664295 as cited in SEQ ID NO 61486
  misc_feature (1)..(1161): Ortholog of  Ceres SEQ ID NO 15179147 as cited in SEQ ID NO 0

SEQ ID NO: 113558 - protein, 323 aa, Arabidopsis thaliana; identical to SEQ ID NO: 102319
  peptide (1)..(323): Ceres Seq. ID no. 13609978

SEQ ID NO: 113559 - protein, 318 aa, Arabidopsis thaliana; identical to SEQ ID NO: 26031
  peptide (1)..(318): Ceres Seq. ID no. 13609979

SEQ ID NO: 113560 - DNA, 666 bp, Arabidopsis thaliana; identical to SEQ ID NO: 102321
  misc_feature (1)..(666): Ceres Seq. ID no. 13609980
  misc_feature (1)..(666): Ortholog of  Ceres SEQ ID NO 13581902 as cited in SEQ ID NO 52223
  misc_feature (1)..(666): Ortholog of  Ceres SEQ ID NO 12585528 as cited in SEQ ID NO 62991

SEQ ID NO: 113561 - protein, 136 aa, Arabidopsis thaliana; identical to SEQ ID NO: 8709
  peptide (1)..(136): Ceres Seq. ID no. 13609981

SEQ ID NO: 113562 - DNA, 642 bp, Arabidopsis thaliana; identical to SEQ ID NO: 102323
  misc_feature (1)..(642): Ceres Seq. ID no. 13609982
  misc_feature (1)..(642): Ortholog of  Ceres SEQ ID NO 13581889 as cited in SEQ ID NO 50900
  misc_feature (1)..(642): Ortholog of  Ceres SEQ ID NO 13581902 as cited in SEQ ID NO 52223
  misc_feature (1)..(642): Ortholog of  Ceres SEQ ID NO 12585528 as cited in SEQ ID NO 62991

SEQ ID NO: 113563 - protein, 157 aa, Arabidopsis thaliana; identical to SEQ ID NO: 102324
  peptide (1)..(157): Ceres Seq. ID no. 13609983

SEQ ID NO: 113564 - protein, 136 aa, Arabidopsis thaliana; identical to SEQ ID NO: 8709
  peptide (1)..(136): Ceres Seq. ID no. 13609984

SEQ ID NO: 113565 - DNA, 1791 bp, Arabidopsis thaliana; identical to SEQ ID NO: 102326
  misc_feature (1)..(1791): Ceres Seq. ID no. 13609989
  misc_feature (1)..(1791): Ortholog of  Ceres SEQ ID NO 14312293 as cited in SEQ ID NO 58744
  misc_feature (1)..(1791): Ortholog of  Ceres SEQ ID NO 15177596 as cited in SEQ ID NO 59731

SEQ ID NO: 113566 - protein, 393 aa, Arabidopsis thaliana; identical to SEQ ID NO: 102327
  peptide (1)..(393): Ceres Seq. ID no. 13609990

SEQ ID NO: 113567 - protein, 286 aa, Arabidopsis thaliana; identical to SEQ ID NO: 102328
  peptide (1)..(286): Ceres Seq. ID no. 13609991

SEQ ID NO: 113568 - protein, 203 aa, Arabidopsis thaliana; identical to SEQ ID NO: 102329
  peptide (1)..(203): Ceres Seq. ID no. 13609992

SEQ ID NO: 113569 - DNA, 1135 bp, Arabidopsis thaliana; identical to SEQ ID NO: 102330
  misc_feature (1)..(1135): Ceres Seq. ID no. 13609993
  misc_feature (1)..(1135): Ortholog of  Ceres SEQ ID NO 15178299 as cited in SEQ ID NO 0
  misc_feature (1)..(1135): Ortholog of  Ceres SEQ ID NO 15226331 as cited in SEQ ID NO 0

SEQ ID NO: 113570 - protein, 217 aa, Arabidopsis thaliana; identical to SEQ ID NO: 22246
  peptide (1)..(217): Ceres Seq. ID no. 13609994

SEQ ID NO: 113571 - protein, 133 aa, Arabidopsis thaliana; identical to SEQ ID NO: 22247
  peptide (1)..(133): Ceres Seq. ID no. 13609995

SEQ ID NO: 113572 - DNA, 1653 bp, Arabidopsis thaliana; identical to SEQ ID NO: 102333
  misc_feature (1)..(1653): Ceres Seq. ID no. 13609996
  misc_feature (1)..(1653): Ortholog of  Ceres SEQ ID NO 13656177 as cited in SEQ ID NO 64997

SEQ ID NO: 113573 - protein, 459 aa, Arabidopsis thaliana; identical to SEQ ID NO: 30126
  peptide (1)..(459): Ceres Seq. ID no. 13609997

SEQ ID NO: 113574 - protein, 427 aa, Arabidopsis thaliana; identical to SEQ ID NO: 20810
  peptide (1)..(427): Ceres Seq. ID no. 13609998

SEQ ID NO: 113575 - protein, 344 aa, Arabidopsis thaliana; identical to SEQ ID NO: 20811
  peptide (1)..(344): Ceres Seq. ID no. 13609999

SEQ ID NO: 113576 - DNA, 1276 bp, Arabidopsis thaliana; identical to SEQ ID NO: 102337
  misc_feature (1)..(1276): Ceres Seq. ID no. 13610006
  misc_feature (1)..(1276): Ortholog of  Ceres SEQ ID NO 15170239 as cited in SEQ ID NO 54977
  misc_feature (1)..(1276): Ortholog of  Ceres SEQ ID NO 12615622 as cited in SEQ ID NO 62802
  misc_feature (1)..(1276): Ortholog of  Ceres SEQ ID NO 13596203 as cited in SEQ ID NO 68499

SEQ ID NO: 113577 - protein, 342 aa, Arabidopsis thaliana; identical to SEQ ID NO: 71908
  peptide (1)..(342): Ceres Seq. ID no. 13610007

SEQ ID NO: 113578 - protein, 304 aa, Arabidopsis thaliana; identical to SEQ ID NO: 71909
  peptide (1)..(304): Ceres Seq. ID no. 13610008

SEQ ID NO: 113579 - protein, 291 aa, Arabidopsis thaliana; identical to SEQ ID NO: 71910
  peptide (1)..(291): Ceres Seq. ID no. 13610009

SEQ ID NO: 113580 - DNA, 1293 bp, Arabidopsis thaliana; identical to SEQ ID NO: 102341
  misc_feature (1)..(1293): Ceres Seq. ID no. 13610010
  misc_feature (1)..(1293): Ortholog of  Ceres SEQ ID NO 15170659 as cited in SEQ ID NO 67270

SEQ ID NO: 113581 - protein, 141 aa, Arabidopsis thaliana; identical to SEQ ID NO: 102342
  peptide (1)..(141): Ceres Seq. ID no. 13610011

SEQ ID NO: 113582 - protein, 137 aa, Arabidopsis thaliana; identical to SEQ ID NO: 102343
  peptide (1)..(137): Ceres Seq. ID no. 13610012

SEQ ID NO: 113583 - protein, 102 aa, Arabidopsis thaliana; identical to SEQ ID NO: 102344
  peptide (1)..(102): Ceres Seq. ID no. 13610013

SEQ ID NO: 113584 - DNA, 1395 bp, Arabidopsis thaliana; identical to SEQ ID NO: 102345
  misc_feature (1)..(1395): Ceres Seq. ID no. 13610027
  misc_feature (1)..(1395): Ortholog of  Ceres SEQ ID NO 13646595 as cited in SEQ ID NO 20561
  misc_feature (1)..(1395): Ortholog of  Ceres SEQ ID NO 15171614 as cited in SEQ ID NO 60106
  misc_feature (1)..(1395): Ortholog of  Ceres SEQ ID NO 13597574 as cited in SEQ ID NO 64677
  misc_feature (1)..(1395): Ortholog of  Ceres SEQ ID NO 13597843 as cited in SEQ ID NO 64850
  misc_feature (1)..(1395): Ortholog of  Ceres SEQ ID NO 13597678 as cited in SEQ ID NO 65375
  misc_feature (1)..(1395): Ortholog of  Ceres SEQ ID NO 12779098 as cited in SEQ ID NO 67698
  misc_feature (1)..(1395): Ortholog of  Ceres SEQ ID NO 13596180 as cited in SEQ ID NO 67941
  misc_feature (1)..(1395): Ortholog of  Ceres SEQ ID NO 13591190 as cited in SEQ ID NO 68044
  misc_feature (1)..(1395): Ortholog of  Ceres SEQ ID NO 13595961 as cited in SEQ ID NO 68223

SEQ ID NO: 113585 - protein, 438 aa, Arabidopsis thaliana; identical to SEQ ID NO: 102346
  peptide (1)..(438): Ceres Seq. ID no. 13610028

SEQ ID NO: 113586 - protein, 381 aa, Arabidopsis thaliana; identical to SEQ ID NO: 102347
  peptide (1)..(381): Ceres Seq. ID no. 13610029

SEQ ID NO: 113587 - protein, 378 aa, Arabidopsis thaliana; identical to SEQ ID NO: 102348
  peptide (1)..(378): Ceres Seq. ID no. 13610030

SEQ ID NO: 113588 - DNA, 637 bp, Arabidopsis thaliana; identical to SEQ ID NO: 102349
  misc_feature (1)..(637): Ceres Seq. ID no. 13610031
  misc_feature (1)..(637): Ortholog of  Ceres SEQ ID NO 13504026 as cited in SEQ ID NO 58279
  misc_feature (1)..(637): Ortholog of  Ceres SEQ ID NO 15226827 as cited in SEQ ID NO 69141

SEQ ID NO: 113589 - protein, 122 aa, Arabidopsis thaliana; identical to SEQ ID NO: 29646
  peptide (1)..(122): Ceres Seq. ID no. 13610032

SEQ ID NO: 113590 - protein, 65 aa, Arabidopsis thaliana; identical to SEQ ID NO: 29647
  peptide (1)..(65): Ceres Seq. ID no. 13610033

SEQ ID NO: 113591 - DNA, 1561 bp, Arabidopsis thaliana; identical to SEQ ID NO: 102352
  misc_feature (1)..(1561): Ceres Seq. ID no. 13610034
  misc_feature (1)..(1561): Ortholog of  Ceres SEQ ID NO 15170420 as cited in SEQ ID NO 54814
  misc_feature (1)..(1561): Ortholog of  Ceres SEQ ID NO 14312785 as cited in SEQ ID NO 55622
  misc_feature (1)..(1561): Ortholog of  Ceres SEQ ID NO 13596925 as cited in SEQ ID NO 62299

SEQ ID NO: 113592 - protein, 359 aa, Arabidopsis thaliana; identical to SEQ ID NO: 43181
  peptide (1)..(359): Ceres Seq. ID no. 13610035

SEQ ID NO: 113593 - protein, 313 aa, Arabidopsis thaliana; identical to SEQ ID NO: 102354
  peptide (1)..(313): Ceres Seq. ID no. 13610036

SEQ ID NO: 113594 - protein, 303 aa, Arabidopsis thaliana; identical to SEQ ID NO: 102355
  peptide (1)..(303): Ceres Seq. ID no. 13610037

SEQ ID NO: 113595 - DNA, 1201 bp, Arabidopsis thaliana; identical to SEQ ID NO: 102356
  misc_feature (1)..(1201): Ceres Seq. ID no. 13610042
  misc_feature (1)..(1201): Ortholog of  Ceres SEQ ID NO 12615485 as cited in SEQ ID NO 62822

SEQ ID NO: 113596 - protein, 271 aa, Arabidopsis thaliana; identical to SEQ ID NO: 25759
  peptide (1)..(271): Ceres Seq. ID no. 13610043

SEQ ID NO: 113597 - protein, 270 aa, Arabidopsis thaliana; identical to SEQ ID NO: 25760
  peptide (1)..(270): Ceres Seq. ID no. 13610044

SEQ ID NO: 113598 - protein, 200 aa, Arabidopsis thaliana; identical to SEQ ID NO: 25761
  peptide (1)..(200): Ceres Seq. ID no. 13610045

SEQ ID NO: 113599 - DNA, 1889 bp, Arabidopsis thaliana; identical to SEQ ID NO: 102360
  misc_feature (1)..(1889): Ceres Seq. ID no. 13610046
  misc_feature (1)..(1889): Ortholog of  Ceres SEQ ID NO 13486771 as cited in SEQ ID NO 20321
  misc_feature (1)..(1889): Ortholog of  Ceres SEQ ID NO 13595840 as cited in SEQ ID NO 56647
  misc_feature (1)..(1889): Ortholog of  Ceres SEQ ID NO 13582260 as cited in SEQ ID NO 59799
  misc_feature (1)..(1889): Ortholog of  Ceres SEQ ID NO 15180619 as cited in SEQ ID NO 0

SEQ ID NO: 113600 - protein, 297 aa, Arabidopsis thaliana; identical to SEQ ID NO: 20322
  peptide (1)..(297): Ceres Seq. ID no. 13610047

SEQ ID NO: 113601 - protein, 293 aa, Arabidopsis thaliana; identical to SEQ ID NO: 20323
  peptide (1)..(293): Ceres Seq. ID no. 13610048

SEQ ID NO: 113602 - protein, 226 aa, Arabidopsis thaliana; identical to SEQ ID NO: 20324
  peptide (1)..(226): Ceres Seq. ID no. 13610049

SEQ ID NO: 113603 - DNA, 1249 bp, Arabidopsis thaliana; identical to SEQ ID NO: 102364
  misc_feature (1)..(1249): Ceres Seq. ID no. 13610058
  misc_feature (1)..(1249): Ortholog of  Ceres SEQ ID NO 15172553 as cited in SEQ ID NO 57496

SEQ ID NO: 113604 - protein, 353 aa, Arabidopsis thaliana; identical to SEQ ID NO: 40611
  peptide (1)..(353): Ceres Seq. ID no. 13610059

SEQ ID NO: 113605 - protein, 347 aa, Arabidopsis thaliana; identical to SEQ ID NO: 40612
  peptide (1)..(347): Ceres Seq. ID no. 13610060

SEQ ID NO: 113606 - protein, 320 aa, Arabidopsis thaliana; identical to SEQ ID NO: 40613
  peptide (1)..(320): Ceres Seq. ID no. 13610061

SEQ ID NO: 113607 - DNA, 1056 bp, Arabidopsis thaliana; identical to SEQ ID NO: 102368
  misc_feature (1)..(1056): Ceres Seq. ID no. 13610077
  misc_feature (1)..(1056): Ortholog of  Ceres SEQ ID NO 15173936 as cited in SEQ ID NO 61736
  misc_feature (1)..(1056): Ortholog of  Ceres SEQ ID NO 13596373 as cited in SEQ ID NO 67991

SEQ ID NO: 113608 - protein, 272 aa, Arabidopsis thaliana; identical to SEQ ID NO: 102369
  peptide (1)..(272): Ceres Seq. ID no. 13610078

SEQ ID NO: 113609 - protein, 147 aa, Arabidopsis thaliana; identical to SEQ ID NO: 102370
  peptide (1)..(147): Ceres Seq. ID no. 13610079

SEQ ID NO: 113610 - DNA, 1306 bp, Arabidopsis thaliana; identical to SEQ ID NO: 102371
  misc_feature (1)..(1306): Ceres Seq. ID no. 13610084
  misc_feature (1)..(1306): Ortholog of  Ceres SEQ ID NO 14310037 as cited in SEQ ID NO 20603

SEQ ID NO: 113611 - protein, 353 aa, Arabidopsis thaliana; identical to SEQ ID NO: 102372
  peptide (1)..(353): Ceres Seq. ID no. 13610085

SEQ ID NO: 113612 - protein, 326 aa, Arabidopsis thaliana; identical to SEQ ID NO: 102373
  peptide (1)..(326): Ceres Seq. ID no. 13610086

SEQ ID NO: 113613 - protein, 313 aa, Arabidopsis thaliana; identical to SEQ ID NO: 102374
  peptide (1)..(313): Ceres Seq. ID no. 13610087

SEQ ID NO: 113614 - DNA, 1135 bp, Arabidopsis thaliana; identical to SEQ ID NO: 102375
  misc_feature (1)..(1135): Ceres Seq. ID no. 13610097
  misc_feature (1)..(1135): Ortholog of  Ceres SEQ ID NO 15170760 as cited in SEQ ID NO 52747
  misc_feature (1)..(1135): Ortholog of  Ceres SEQ ID NO 15168549 as cited in SEQ ID NO 56976
  misc_feature (1)..(1135): Ortholog of  Ceres SEQ ID NO 14314335 as cited in SEQ ID NO 57305
  misc_feature (1)..(1135): Ortholog of  Ceres SEQ ID NO 15177588 as cited in SEQ ID NO 60367

SEQ ID NO: 113615 - protein, 306 aa, Arabidopsis thaliana; identical to SEQ ID NO: 102376
  peptide (1)..(306): Ceres Seq. ID no. 13610098

SEQ ID NO: 113616 - protein, 285 aa, Arabidopsis thaliana; identical to SEQ ID NO: 102377
  peptide (1)..(285): Ceres Seq. ID no. 13610099

SEQ ID NO: 113617 - protein, 198 aa, Arabidopsis thaliana; identical to SEQ ID NO: 102378
  peptide (1)..(198): Ceres Seq. ID no. 13610100

SEQ ID NO: 113618 - DNA, 758 bp, Arabidopsis thaliana; identical to SEQ ID NO: 102379
  misc_feature (1)..(758): Ceres Seq. ID no. 13610101
  misc_feature (1)..(758): Ortholog of  Ceres SEQ ID NO 15168856 as cited in SEQ ID NO 56354

SEQ ID NO: 113619 - protein, 209 aa, Arabidopsis thaliana; identical to SEQ ID NO: 102380
  peptide (1)..(209): Ceres Seq. ID no. 13610102

SEQ ID NO: 113620 - protein, 180 aa, Arabidopsis thaliana; identical to SEQ ID NO: 102381
  peptide (1)..(180): Ceres Seq. ID no. 13610103

SEQ ID NO: 113621 - protein, 179 aa, Arabidopsis thaliana; identical to SEQ ID NO: 102382
  peptide (1)..(179): Ceres Seq. ID no. 13610104

SEQ ID NO: 113622 - DNA, 1369 bp, Arabidopsis thaliana; identical to SEQ ID NO: 102383
  misc_feature (1)..(1369): Ceres Seq. ID no. 13610120
  misc_feature (1)..(1369): Ortholog of  Ceres SEQ ID NO 13595351 as cited in SEQ ID NO 55934
  misc_feature (1)..(1369): Ortholog of  Ceres SEQ ID NO 13595513 as cited in SEQ ID NO 56663
  misc_feature (1)..(1369): Ortholog of  Ceres SEQ ID NO 13639645 as cited in SEQ ID NO 57488

SEQ ID NO: 113623 - protein, 380 aa, Arabidopsis thaliana; identical to SEQ ID NO: 30041
  peptide (1)..(380): Ceres Seq. ID no. 13610121

SEQ ID NO: 113624 - protein, 371 aa, Arabidopsis thaliana; identical to SEQ ID NO: 30042
  peptide (1)..(371): Ceres Seq. ID no. 13610122

SEQ ID NO: 113625 - protein, 362 aa, Arabidopsis thaliana; identical to SEQ ID NO: 30043
  peptide (1)..(362): Ceres Seq. ID no. 13610123

SEQ ID NO: 113626 - DNA, 570 bp, Arabidopsis thaliana; identical to SEQ ID NO: 102387
  misc_feature (1)..(570): Ceres Seq. ID no. 13610124
  misc_feature (1)..(570): Ortholog of  Ceres SEQ ID NO 12783998 as cited in SEQ ID NO 61535

SEQ ID NO: 113627 - protein, 160 aa, Arabidopsis thaliana; identical to SEQ ID NO: 21871
  peptide (1)..(160): Ceres Seq. ID no. 13610125

SEQ ID NO: 113628 - protein, 138 aa, Arabidopsis thaliana; identical to SEQ ID NO: 21872
  peptide (1)..(138): Ceres Seq. ID no. 13610126

SEQ ID NO: 113629 - DNA, 1232 bp, Arabidopsis thaliana; identical to SEQ ID NO: 102390
  misc_feature (1)..(1232): Ceres Seq. ID no. 13610130
  misc_feature (1)..(1232): Ortholog of  Ceres SEQ ID NO 15169372 as cited in SEQ ID NO 58778

SEQ ID NO: 113630 - protein, 370 aa, Arabidopsis thaliana; identical to SEQ ID NO: 102391
  peptide (1)..(370): Ceres Seq. ID no. 13610131

SEQ ID NO: 113631 - protein, 321 aa, Arabidopsis thaliana; identical to SEQ ID NO: 102392
  peptide (1)..(321): Ceres Seq. ID no. 13610132

SEQ ID NO: 113632 - protein, 315 aa, Arabidopsis thaliana; identical to SEQ ID NO: 102393
  peptide (1)..(315): Ceres Seq. ID no. 13610133

SEQ ID NO: 113633 - DNA, 1158 bp, Arabidopsis thaliana; identical to SEQ ID NO: 102394
  misc_feature (1)..(1158): Ceres Seq. ID no. 13610137
  misc_feature (1)..(1158): Ortholog of  Ceres SEQ ID NO 12474685 as cited in SEQ ID NO 88
  misc_feature (1)..(1158): Ortholog of  Ceres SEQ ID NO 13638574 as cited in SEQ ID NO 51223
  misc_feature (1)..(1158): Ortholog of  Ceres SEQ ID NO 14311531 as cited in SEQ ID NO 51466
  misc_feature (1)..(1158): Ortholog of  Ceres SEQ ID NO 15170465 as cited in SEQ ID NO 52798
  misc_feature (1)..(1158): Ortholog of  Ceres SEQ ID NO 15177112 as cited in SEQ ID NO 55956
  misc_feature (1)..(1158): Ortholog of  Ceres SEQ ID NO 12610790 as cited in SEQ ID NO 56123
  misc_feature (1)..(1158): Ortholog of  Ceres SEQ ID NO 14315399 as cited in SEQ ID NO 57112
  misc_feature (1)..(1158): Ortholog of  Ceres SEQ ID NO 13655636 as cited in SEQ ID NO 63519
  misc_feature (1)..(1158): Ortholog of  Ceres SEQ ID NO 13655896 as cited in SEQ ID NO 64970

SEQ ID NO: 113634 - protein, 314 aa, Arabidopsis thaliana; identical to SEQ ID NO: 102395
  peptide (1)..(314): Ceres Seq. ID no. 13610138

SEQ ID NO: 113635 - protein, 239 aa, Arabidopsis thaliana; identical to SEQ ID NO: 102396
  peptide (1)..(239): Ceres Seq. ID no. 13610139

SEQ ID NO: 113636 - protein, 172 aa, Arabidopsis thaliana; identical to SEQ ID NO: 102397
  peptide (1)..(172): Ceres Seq. ID no. 13610140

SEQ ID NO: 113637 - DNA, 1197 bp, Arabidopsis thaliana; identical to SEQ ID NO: 102398
  misc_feature (1)..(1197): Ceres Seq. ID no. 13610149
  misc_feature (1)..(1197): Ortholog of  Ceres SEQ ID NO 13596110 as cited in SEQ ID NO 68647

SEQ ID NO: 113638 - protein, 337 aa, Arabidopsis thaliana; identical to SEQ ID NO: 102399
  peptide (1)..(337): Ceres Seq. ID no. 13610150

SEQ ID NO: 113639 - protein, 318 aa, Arabidopsis thaliana; identical to SEQ ID NO: 102400
  peptide (1)..(318): Ceres Seq. ID no. 13610151

SEQ ID NO: 113640 - protein, 314 aa, Arabidopsis thaliana; identical to SEQ ID NO: 102401
  peptide (1)..(314): Ceres Seq. ID no. 13610152

SEQ ID NO: 113641 - DNA, 1645 bp, Arabidopsis thaliana; identical to SEQ ID NO: 102402
  misc_feature (1)..(1645): Ceres Seq. ID no. 13610153
  misc_feature (1)..(1645): Ortholog of  Ceres SEQ ID NO 13638441 as cited in SEQ ID NO 58066

SEQ ID NO: 113642 - protein, 298 aa, Arabidopsis thaliana; identical to SEQ ID NO: 102403
  peptide (1)..(298): Ceres Seq. ID no. 13610154

SEQ ID NO: 113643 - protein, 291 aa, Arabidopsis thaliana; identical to SEQ ID NO: 72250
  peptide (1)..(291): Ceres Seq. ID no. 13610155

SEQ ID NO: 113644 - protein, 241 aa, Arabidopsis thaliana; identical to SEQ ID NO: 72251
  peptide (1)..(241): Ceres Seq. ID no. 13610156

SEQ ID NO: 113645 - DNA, 2171 bp, Arabidopsis thaliana; identical to SEQ ID NO: 102406
  misc_feature (1)..(2171): Ceres Seq. ID no. 13610157
  misc_feature (1)..(2171): Ortholog of  Ceres SEQ ID NO 15174875 as cited in SEQ ID NO 56464

SEQ ID NO: 113646 - protein, 273 aa, Arabidopsis thaliana; identical to SEQ ID NO: 102407
  peptide (1)..(273): Ceres Seq. ID no. 13610158

SEQ ID NO: 113647 - protein, 198 aa, Arabidopsis thaliana; identical to SEQ ID NO: 102408
  peptide (1)..(198): Ceres Seq. ID no. 13610159

SEQ ID NO: 113648 - protein, 188 aa, Arabidopsis thaliana; identical to SEQ ID NO: 102409
  peptide (1)..(188): Ceres Seq. ID no. 13610160
  misc_feature (15)..(15): Xaa is any aa, unknown or other
  misc_feature (64)..(64): Xaa is any aa, unknown or other
  misc_feature (72)..(72): Xaa is any aa, unknown or other
  misc_feature (108)..(108): Xaa is any aa, unknown or other

SEQ ID NO: 113649 - DNA, 2005 bp, Arabidopsis thaliana; identical to SEQ ID NO: 102410
  misc_feature (1)..(2005): Ceres Seq. ID no. 13610179
  misc_feature (1)..(2005): Ortholog of  Ceres SEQ ID NO 14310556 as cited in SEQ ID NO 54965

SEQ ID NO: 113650 - protein, 569 aa, Arabidopsis thaliana; identical to SEQ ID NO: 102411
  peptide (1)..(569): Ceres Seq. ID no. 13610180

SEQ ID NO: 113651 - protein, 548 aa, Arabidopsis thaliana; identical to SEQ ID NO: 102412
  peptide (1)..(548): Ceres Seq. ID no. 13610181

SEQ ID NO: 113652 - protein, 487 aa, Arabidopsis thaliana; identical to SEQ ID NO: 102413
  peptide (1)..(487): Ceres Seq. ID no. 13610182

SEQ ID NO: 113653 - DNA, 2304 bp, Arabidopsis thaliana; identical to SEQ ID NO: 102414
  misc_feature (1)..(2304): Ceres Seq. ID no. 13610183
  misc_feature (1)..(2304): Ortholog of  Ceres SEQ ID NO 12611963 as cited in SEQ ID NO 53414

SEQ ID NO: 113654 - protein, 529 aa, Arabidopsis thaliana; identical to SEQ ID NO: 102415
  peptide (1)..(529): Ceres Seq. ID no. 13610184

SEQ ID NO: 113655 - protein, 389 aa, Arabidopsis thaliana; identical to SEQ ID NO: 102416
  peptide (1)..(389): Ceres Seq. ID no. 13610185

SEQ ID NO: 113656 - protein, 328 aa, Arabidopsis thaliana; identical to SEQ ID NO: 42411
  peptide (1)..(328): Ceres Seq. ID no. 13610186

SEQ ID NO: 113657 - DNA, 730 bp, Arabidopsis thaliana; identical to SEQ ID NO: 102418
  misc_feature (1)..(730): Ceres Seq. ID no. 13610191
  misc_feature (1)..(730): Ortholog of  Ceres SEQ ID NO 12610904 as cited in SEQ ID NO 55865

SEQ ID NO: 113658 - protein, 182 aa, Arabidopsis thaliana; identical to SEQ ID NO: 21101
  peptide (1)..(182): Ceres Seq. ID no. 13610192

SEQ ID NO: 113659 - DNA, 2222 bp, Arabidopsis thaliana; identical to SEQ ID NO: 102420
  misc_feature (1)..(2222): Ceres Seq. ID no. 13610196
  misc_feature (1)..(2222): Ortholog of  Ceres SEQ ID NO 14310784 as cited in SEQ ID NO 58503

SEQ ID NO: 113660 - protein, 623 aa, Arabidopsis thaliana; identical to SEQ ID NO: 102421
  peptide (1)..(623): Ceres Seq. ID no. 13610197

SEQ ID NO: 113661 - protein, 622 aa, Arabidopsis thaliana; identical to SEQ ID NO: 102422
  peptide (1)..(622): Ceres Seq. ID no. 13610198

SEQ ID NO: 113662 - protein, 594 aa, Arabidopsis thaliana; identical to SEQ ID NO: 102423
  peptide (1)..(594): Ceres Seq. ID no. 13610199

SEQ ID NO: 113663 - DNA, 1394 bp, Arabidopsis thaliana; identical to SEQ ID NO: 102424
  misc_feature (1)..(1394): Ceres Seq. ID no. 13610217
  misc_feature (1)..(1394): Ortholog of  Ceres SEQ ID NO 12599421 as cited in SEQ ID NO 65135

SEQ ID NO: 113664 - protein, 328 aa, Arabidopsis thaliana; identical to SEQ ID NO: 35459
  peptide (1)..(328): Ceres Seq. ID no. 13610218

SEQ ID NO: 113665 - protein, 266 aa, Arabidopsis thaliana; identical to SEQ ID NO: 35460
  peptide (1)..(266): Ceres Seq. ID no. 13610219

SEQ ID NO: 113666 - protein, 216 aa, Arabidopsis thaliana; identical to SEQ ID NO: 35461
  peptide (1)..(216): Ceres Seq. ID no. 13610220

SEQ ID NO: 113667 - DNA, 1588 bp, Arabidopsis thaliana; identical to SEQ ID NO: 102428
  misc_feature (1)..(1588): Ceres Seq. ID no. 13610221
  misc_feature (1)..(1588): Ortholog of  Ceres SEQ ID NO 13599602 as cited in SEQ ID NO 0

SEQ ID NO: 113668 - protein, 453 aa, Arabidopsis thaliana; identical to SEQ ID NO: 42024
  peptide (1)..(453): Ceres Seq. ID no. 13610222

SEQ ID NO: 113669 - protein, 443 aa, Arabidopsis thaliana; identical to SEQ ID NO: 42025
  peptide (1)..(443): Ceres Seq. ID no. 13610223

SEQ ID NO: 113670 - protein, 334 aa, Arabidopsis thaliana; identical to SEQ ID NO: 42026
  peptide (1)..(334): Ceres Seq. ID no. 13610224

SEQ ID NO: 113671 - DNA, 1336 bp, Arabidopsis thaliana; identical to SEQ ID NO: 102432
  misc_feature (1)..(1336): Ceres Seq. ID no. 13610304
  misc_feature (1)..(1336): Ortholog of  Ceres SEQ ID NO 13654187 as cited in SEQ ID NO 68219

SEQ ID NO: 113672 - protein, 318 aa, Arabidopsis thaliana; identical to SEQ ID NO: 84402
  peptide (1)..(318): Ceres Seq. ID no. 13610305

SEQ ID NO: 113673 - protein, 179 aa, Arabidopsis thaliana; identical to SEQ ID NO: 84403
  peptide (1)..(179): Ceres Seq. ID no. 13610306

SEQ ID NO: 113674 - protein, 175 aa, Arabidopsis thaliana; identical to SEQ ID NO: 84404
  peptide (1)..(175): Ceres Seq. ID no. 13610307

SEQ ID NO: 113675 - DNA, 795 bp, Arabidopsis thaliana; identical to SEQ ID NO: 102436
  misc_feature (1)..(795): Ceres Seq. ID no. 13610308
  misc_feature (1)..(795): Ortholog of  Ceres SEQ ID NO 12610341 as cited in SEQ ID NO 56073

SEQ ID NO: 113676 - protein, 140 aa, Arabidopsis thaliana; identical to SEQ ID NO: 27802
  peptide (1)..(140): Ceres Seq. ID no. 13610309

SEQ ID NO: 113677 - protein, 127 aa, Arabidopsis thaliana; identical to SEQ ID NO: 27803
  peptide (1)..(127): Ceres Seq. ID no. 13610310

SEQ ID NO: 113678 - protein, 97 aa, Arabidopsis thaliana; identical to SEQ ID NO: 27804
  peptide (1)..(97): Ceres Seq. ID no. 13610311

SEQ ID NO: 113679 - DNA, 740 bp, Arabidopsis thaliana; identical to SEQ ID NO: 102440
  misc_feature (1)..(740): Ceres Seq. ID no. 13610312
  misc_feature (1)..(740): Ortholog of  Ceres SEQ ID NO 15172885 as cited in SEQ ID NO 51883
  misc_feature (1)..(740): Ortholog of  Ceres SEQ ID NO 13594663 as cited in SEQ ID NO 51894
  misc_feature (1)..(740): Ortholog of  Ceres SEQ ID NO 15226128 as cited in SEQ ID NO 60215
  misc_feature (1)..(740): Ortholog of  Ceres SEQ ID NO 14302271 as cited in SEQ ID NO 68360
  misc_feature (1)..(740): Ortholog of  Ceres SEQ ID NO 12635134 as cited in SEQ ID NO 0
  misc_feature (1)..(740): Ortholog of  Ceres SEQ ID NO 13623037 as cited in SEQ ID NO 0
  misc_feature (1)..(740): Ortholog of  Ceres SEQ ID NO 15175141 as cited in SEQ ID NO 0

SEQ ID NO: 113680 - protein, 166 aa, Arabidopsis thaliana; identical to SEQ ID NO: 35439
  peptide (1)..(166): Ceres Seq. ID no. 13610313

SEQ ID NO: 113681 - protein, 162 aa, Arabidopsis thaliana; identical to SEQ ID NO: 35440
  peptide (1)..(162): Ceres Seq. ID no. 13610314

SEQ ID NO: 113682 - DNA, 1111 bp, Arabidopsis thaliana; identical to SEQ ID NO: 102443
  misc_feature (1)..(1111): Ceres Seq. ID no. 13610319
  misc_feature (1)..(1111): Ortholog of  Ceres SEQ ID NO 13639514 as cited in SEQ ID NO 55736
  misc_feature (1)..(1111): Ortholog of  Ceres SEQ ID NO 13595560 as cited in SEQ ID NO 56738
  misc_feature (1)..(1111): Ortholog of  Ceres SEQ ID NO 14312254 as cited in SEQ ID NO 59148
  misc_feature (1)..(1111): Ortholog of  Ceres SEQ ID NO 13662804 as cited in SEQ ID NO 65394
  misc_feature (1)..(1111): Ortholog of  Ceres SEQ ID NO 13656519 as cited in SEQ ID NO 69226

SEQ ID NO: 113683 - protein, 213 aa, Arabidopsis thaliana; identical to SEQ ID NO: 102444
  peptide (1)..(213): Ceres Seq. ID no. 13610320

SEQ ID NO: 113684 - protein, 174 aa, Arabidopsis thaliana; identical to SEQ ID NO: 102445
  peptide (1)..(174): Ceres Seq. ID no. 13610321

SEQ ID NO: 113685 - DNA, 1530 bp, Arabidopsis thaliana; identical to SEQ ID NO: 102446
  misc_feature (1)..(1530): Ceres Seq. ID no. 13610322
  misc_feature (1)..(1530): Ortholog of  Ceres SEQ ID NO 13596581 as cited in SEQ ID NO 62420
  misc_feature (1)..(1530): Ortholog of  Ceres SEQ ID NO 13591273 as cited in SEQ ID NO 65904
  misc_feature (1)..(1530): Ortholog of  Ceres SEQ ID NO 13623086 as cited in SEQ ID NO 0

SEQ ID NO: 113686 - protein, 394 aa, Arabidopsis thaliana; identical to SEQ ID NO: 102447
  peptide (1)..(394): Ceres Seq. ID no. 13610323

SEQ ID NO: 113687 - protein, 359 aa, Arabidopsis thaliana; identical to SEQ ID NO: 102448
  peptide (1)..(359): Ceres Seq. ID no. 13610324

SEQ ID NO: 113688 - protein, 272 aa, Arabidopsis thaliana; identical to SEQ ID NO: 102449
  peptide (1)..(272): Ceres Seq. ID no. 13610325

SEQ ID NO: 113689 - DNA, 1408 bp, Arabidopsis thaliana; identical to SEQ ID NO: 102450
  misc_feature (1)..(1408): Ceres Seq. ID no. 13610326
  misc_feature (1)..(1408): Ortholog of  Ceres SEQ ID NO 15168476 as cited in SEQ ID NO 60262

SEQ ID NO: 113690 - protein, 358 aa, Arabidopsis thaliana; identical to SEQ ID NO: 102451
  peptide (1)..(358): Ceres Seq. ID no. 13610327

SEQ ID NO: 113691 - protein, 328 aa, Arabidopsis thaliana; identical to SEQ ID NO: 102452
  peptide (1)..(328): Ceres Seq. ID no. 13610328

SEQ ID NO: 113692 - protein, 276 aa, Arabidopsis thaliana; identical to SEQ ID NO: 102453
  peptide (1)..(276): Ceres Seq. ID no. 13610329

SEQ ID NO: 113693 - DNA, 1335 bp, Arabidopsis thaliana; identical to SEQ ID NO: 102454
  misc_feature (1)..(1335): Ceres Seq. ID no. 13610330
  misc_feature (1)..(1335): Ortholog of  Ceres SEQ ID NO 15177221 as cited in SEQ ID NO 53046
  misc_feature (1)..(1335): Ortholog of  Ceres SEQ ID NO 12616332 as cited in SEQ ID NO 63449
  misc_feature (1)..(1335): Ortholog of  Ceres SEQ ID NO 13597498 as cited in SEQ ID NO 64648

SEQ ID NO: 113694 - protein, 263 aa, Arabidopsis thaliana; identical to SEQ ID NO: 102455
  peptide (1)..(263): Ceres Seq. ID no. 13610331

SEQ ID NO: 113695 - protein, 251 aa, Arabidopsis thaliana; identical to SEQ ID NO: 102456
  peptide (1)..(251): Ceres Seq. ID no. 13610332

SEQ ID NO: 113696 - protein, 249 aa, Arabidopsis thaliana; identical to SEQ ID NO: 102457
  peptide (1)..(249): Ceres Seq. ID no. 13610333

SEQ ID NO: 113697 - DNA, 823 bp, Arabidopsis thaliana; identical to SEQ ID NO: 102458
  misc_feature (1)..(823): Ceres Seq. ID no. 13610334
  misc_feature (1)..(823): Ortholog of  Ceres SEQ ID NO 14316371 as cited in SEQ ID NO 60113

SEQ ID NO: 113698 - protein, 225 aa, Arabidopsis thaliana; identical to SEQ ID NO: 39227
  peptide (1)..(225): Ceres Seq. ID no. 13610335

SEQ ID NO: 113699 - protein, 209 aa, Arabidopsis thaliana; identical to SEQ ID NO: 39228
  peptide (1)..(209): Ceres Seq. ID no. 13610336

SEQ ID NO: 113700 - protein, 133 aa, Arabidopsis thaliana; identical to SEQ ID NO: 39229
  peptide (1)..(133): Ceres Seq. ID no. 13610337

SEQ ID NO: 113701 - DNA, 1688 bp, Arabidopsis thaliana; identical to SEQ ID NO: 102462
  misc_feature (1)..(1688): Ceres Seq. ID no. 13610341
  misc_feature (1)..(1688): Ortholog of  Ceres SEQ ID NO 15180548 as cited in SEQ ID NO 0

SEQ ID NO: 113702 - protein, 475 aa, Arabidopsis thaliana; identical to SEQ ID NO: 102463
  peptide (1)..(475): Ceres Seq. ID no. 13610342

SEQ ID NO: 113703 - protein, 409 aa, Arabidopsis thaliana; identical to SEQ ID NO: 102464
  peptide (1)..(409): Ceres Seq. ID no. 13610343

SEQ ID NO: 113704 - protein, 397 aa, Arabidopsis thaliana; identical to SEQ ID NO: 102465
  peptide (1)..(397): Ceres Seq. ID no. 13610344

SEQ ID NO: 113705 - DNA, 902 bp, Arabidopsis thaliana; identical to SEQ ID NO: 102466
  misc_feature (1)..(902): Ceres Seq. ID no. 13610377
  misc_feature (1)..(902): Ortholog of  Ceres SEQ ID NO 12608620 as cited in SEQ ID NO 60192
  misc_feature (1)..(902): Ortholog of  Ceres SEQ ID NO 13662898 as cited in SEQ ID NO 66199
  misc_feature (1)..(902): Ortholog of  Ceres SEQ ID NO 13654314 as cited in SEQ ID NO 67914

SEQ ID NO: 113706 - protein, 258 aa, Arabidopsis thaliana; identical to SEQ ID NO: 102467
  peptide (1)..(258): Ceres Seq. ID no. 13610378

SEQ ID NO: 113707 - protein, 195 aa, Arabidopsis thaliana; identical to SEQ ID NO: 34807
  peptide (1)..(195): Ceres Seq. ID no. 13610379

SEQ ID NO: 113708 - DNA, 1643 bp, Arabidopsis thaliana; identical to SEQ ID NO: 102469
  misc_feature (1)..(1643): Ceres Seq. ID no. 13610380
  misc_feature (1)..(1643): Ortholog of  Ceres SEQ ID NO 13647847 as cited in SEQ ID NO 20430
  misc_feature (1)..(1643): Ortholog of  Ceres SEQ ID NO 15171696 as cited in SEQ ID NO 59997

SEQ ID NO: 113709 - protein, 388 aa, Arabidopsis thaliana; identical to SEQ ID NO: 24646
  peptide (1)..(388): Ceres Seq. ID no. 13610381

SEQ ID NO: 113710 - protein, 309 aa, Arabidopsis thaliana; identical to SEQ ID NO: 24647
  peptide (1)..(309): Ceres Seq. ID no. 13610382

SEQ ID NO: 113711 - protein, 282 aa, Arabidopsis thaliana; identical to SEQ ID NO: 24648
  peptide (1)..(282): Ceres Seq. ID no. 13610383

SEQ ID NO: 113712 - DNA, 826 bp, Arabidopsis thaliana; identical to SEQ ID NO: 102473
  misc_feature (1)..(826): Ceres Seq. ID no. 13610384
  misc_feature (1)..(826): Ortholog of  Ceres SEQ ID NO 15172913 as cited in SEQ ID NO 51824
  misc_feature (1)..(826): Ortholog of  Ceres SEQ ID NO 13654659 as cited in SEQ ID NO 61998

SEQ ID NO: 113713 - protein, 225 aa, Arabidopsis thaliana; identical to SEQ ID NO: 102474
  peptide (1)..(225): Ceres Seq. ID no. 13610385

SEQ ID NO: 113714 - protein, 179 aa, Arabidopsis thaliana; identical to SEQ ID NO: 102475
  peptide (1)..(179): Ceres Seq. ID no. 13610386

SEQ ID NO: 113715 - DNA, 1032 bp, Arabidopsis thaliana; identical to SEQ ID NO: 102476
  misc_feature (1)..(1032): Ceres Seq. ID no. 13610395
  misc_feature (1)..(1032): Ortholog of  Ceres SEQ ID NO 13598735 as cited in SEQ ID NO 64586

SEQ ID NO: 113716 - protein, 322 aa, Arabidopsis thaliana; identical to SEQ ID NO: 38450
  peptide (1)..(322): Ceres Seq. ID no. 13610396

SEQ ID NO: 113717 - protein, 309 aa, Arabidopsis thaliana; identical to SEQ ID NO: 38451
  peptide (1)..(309): Ceres Seq. ID no. 13610397

SEQ ID NO: 113718 - protein, 184 aa, Arabidopsis thaliana; identical to SEQ ID NO: 38452
  peptide (1)..(184): Ceres Seq. ID no. 13610398

SEQ ID NO: 113719 - DNA, 641 bp, Arabidopsis thaliana; identical to SEQ ID NO: 102480
  misc_feature (1)..(641): Ceres Seq. ID no. 13610410
  misc_feature (1)..(641): Ortholog of  Ceres SEQ ID NO 13595627 as cited in SEQ ID NO 59826
  misc_feature (1)..(641): Ortholog of  Ceres SEQ ID NO 15177889 as cited in SEQ ID NO 0

SEQ ID NO: 113720 - protein, 212 aa, Arabidopsis thaliana; identical to SEQ ID NO: 102481
  peptide (1)..(212): Ceres Seq. ID no. 13610411

SEQ ID NO: 113721 - protein, 209 aa, Arabidopsis thaliana; identical to SEQ ID NO: 102482
  peptide (1)..(209): Ceres Seq. ID no. 13610412

SEQ ID NO: 113722 - DNA, 1126 bp, Arabidopsis thaliana; identical to SEQ ID NO: 102483
  misc_feature (1)..(1126): Ceres Seq. ID no. 13610421
  misc_feature (1)..(1126): Ortholog of  Ceres SEQ ID NO 14315060 as cited in SEQ ID NO 60039
  misc_feature (1)..(1126): Ortholog of  Ceres SEQ ID NO 13597809 as cited in SEQ ID NO 64598
  misc_feature (1)..(1126): Ortholog of  Ceres SEQ ID NO 12617960 as cited in SEQ ID NO 69051
  misc_feature (1)..(1126): Ortholog of  Ceres SEQ ID NO 13589401 as cited in SEQ ID NO 0

SEQ ID NO: 113723 - protein, 247 aa, Arabidopsis thaliana; identical to SEQ ID NO: 29724
  peptide (1)..(247): Ceres Seq. ID no. 13610422

SEQ ID NO: 113724 - protein, 170 aa, Arabidopsis thaliana; identical to SEQ ID NO: 29725
  peptide (1)..(170): Ceres Seq. ID no. 13610423

SEQ ID NO: 113725 - protein, 142 aa, Arabidopsis thaliana; identical to SEQ ID NO: 29726
  peptide (1)..(142): Ceres Seq. ID no. 13610424

SEQ ID NO: 113726 - DNA, 1630 bp, Arabidopsis thaliana; identical to SEQ ID NO: 102487
  misc_feature (1)..(1630): Ceres Seq. ID no. 13610428
  misc_feature (1)..(1630): Ortholog of  Ceres SEQ ID NO 13582619 as cited in SEQ ID NO 56520
  misc_feature (1)..(1630): Ortholog of  Ceres SEQ ID NO 12611392 as cited in SEQ ID NO 56826
  misc_feature (1)..(1630): Ortholog of  Ceres SEQ ID NO 13660872 as cited in SEQ ID NO 60830
  misc_feature (1)..(1630): Ortholog of  Ceres SEQ ID NO 12616221 as cited in SEQ ID NO 63291

SEQ ID NO: 113727 - protein, 447 aa, Arabidopsis thaliana; identical to SEQ ID NO: 42227
  peptide (1)..(447): Ceres Seq. ID no. 13610429

SEQ ID NO: 113728 - protein, 347 aa, Arabidopsis thaliana; identical to SEQ ID NO: 42228
  peptide (1)..(347): Ceres Seq. ID no. 13610430

SEQ ID NO: 113729 - protein, 320 aa, Arabidopsis thaliana; identical to SEQ ID NO: 42229
  peptide (1)..(320): Ceres Seq. ID no. 13610431

SEQ ID NO: 113730 - DNA, 1871 bp, Arabidopsis thaliana; identical to SEQ ID NO: 102491
  misc_feature (1)..(1871): Ceres Seq. ID no. 13610432
  misc_feature (1)..(1871): Ortholog of  Ceres SEQ ID NO 13582619 as cited in SEQ ID NO 56520
  misc_feature (1)..(1871): Ortholog of  Ceres SEQ ID NO 13660872 as cited in SEQ ID NO 60830
  misc_feature (1)..(1871): Ortholog of  Ceres SEQ ID NO 12616221 as cited in SEQ ID NO 63291

SEQ ID NO: 113731 - protein, 584 aa, Arabidopsis thaliana; identical to SEQ ID NO: 24536
  peptide (1)..(584): Ceres Seq. ID no. 13610433

SEQ ID NO: 113732 - protein, 549 aa, Arabidopsis thaliana; identical to SEQ ID NO: 24537
  peptide (1)..(549): Ceres Seq. ID no. 13610434

SEQ ID NO: 113733 - protein, 478 aa, Arabidopsis thaliana; identical to SEQ ID NO: 24538
  peptide (1)..(478): Ceres Seq. ID no. 13610435

SEQ ID NO: 113734 - DNA, 1280 bp, Arabidopsis thaliana; identical to SEQ ID NO: 102495
  misc_feature (1)..(1280): Ceres Seq. ID no. 13610447
  misc_feature (1)..(1280): Ortholog of  Ceres SEQ ID NO 15180663 as cited in SEQ ID NO 1227
  misc_feature (1)..(1280): Ortholog of  Ceres SEQ ID NO 12415963 as cited in SEQ ID NO 0

SEQ ID NO: 113735 - protein, 385 aa, Arabidopsis thaliana; identical to SEQ ID NO: 35004
  peptide (1)..(385): Ceres Seq. ID no. 13610448

SEQ ID NO: 113736 - protein, 362 aa, Arabidopsis thaliana; identical to SEQ ID NO: 35005
  peptide (1)..(362): Ceres Seq. ID no. 13610449

SEQ ID NO: 113737 - DNA, 796 bp, Arabidopsis thaliana; identical to SEQ ID NO: 102498
  misc_feature (1)..(796): Ceres Seq. ID no. 13610458
  misc_feature (1)..(796): Ortholog of  Ceres SEQ ID NO 12624558 as cited in SEQ ID NO 61726
  misc_feature (1)..(796): Ortholog of  Ceres SEQ ID NO 12635763 as cited in SEQ ID NO 0

SEQ ID NO: 113738 - protein, 174 aa, Arabidopsis thaliana; identical to SEQ ID NO: 28853
  peptide (1)..(174): Ceres Seq. ID no. 13610459

SEQ ID NO: 113739 - protein, 163 aa, Arabidopsis thaliana; identical to SEQ ID NO: 28854
  peptide (1)..(163): Ceres Seq. ID no. 13610460

SEQ ID NO: 113740 - protein, 152 aa, Arabidopsis thaliana; identical to SEQ ID NO: 28855
  peptide (1)..(152): Ceres Seq. ID no. 13610461

SEQ ID NO: 113741 - DNA, 1462 bp, Arabidopsis thaliana; identical to SEQ ID NO: 102502
  misc_feature (1)..(1462): Ceres Seq. ID no. 13610517
  misc_feature (1)..(1462): Ortholog of  Ceres SEQ ID NO 15176423 as cited in SEQ ID NO 53228

SEQ ID NO: 113742 - protein, 338 aa, Arabidopsis thaliana; identical to SEQ ID NO: 42191
  peptide (1)..(338): Ceres Seq. ID no. 13610518

SEQ ID NO: 113743 - protein, 329 aa, Arabidopsis thaliana; identical to SEQ ID NO: 42192
  peptide (1)..(329): Ceres Seq. ID no. 13610519

SEQ ID NO: 113744 - protein, 205 aa, Arabidopsis thaliana; identical to SEQ ID NO: 42193
  peptide (1)..(205): Ceres Seq. ID no. 13610520

SEQ ID NO: 113745 - DNA, 790 bp, Arabidopsis thaliana; identical to SEQ ID NO: 102506
  misc_feature (1)..(790): Ceres Seq. ID no. 13610543
  misc_feature (1)..(790): Ortholog of  Ceres SEQ ID NO 13661557 as cited in SEQ ID NO 60999

SEQ ID NO: 113746 - protein, 158 aa, Arabidopsis thaliana; identical to SEQ ID NO: 102507
  peptide (1)..(158): Ceres Seq. ID no. 13610544

SEQ ID NO: 113747 - protein, 119 aa, Arabidopsis thaliana; identical to SEQ ID NO: 27008
  peptide (1)..(119): Ceres Seq. ID no. 13610545

SEQ ID NO: 113748 - DNA, 849 bp, Arabidopsis thaliana; identical to SEQ ID NO: 102509
  misc_feature (1)..(849): Ceres Seq. ID no. 13610546
  misc_feature (1)..(849): Ortholog of  Ceres SEQ ID NO 13638716 as cited in SEQ ID NO 51101
  misc_feature (1)..(849): Ortholog of  Ceres SEQ ID NO 14306010 as cited in SEQ ID NO 59330
  misc_feature (1)..(849): Ortholog of  Ceres SEQ ID NO 12627045 as cited in SEQ ID NO 67611

SEQ ID NO: 113749 - protein, 175 aa, Arabidopsis thaliana; identical to SEQ ID NO: 23110
  peptide (1)..(175): Ceres Seq. ID no. 13610547

SEQ ID NO: 113750 - protein, 139 aa, Arabidopsis thaliana; identical to SEQ ID NO: 23111
  peptide (1)..(139): Ceres Seq. ID no. 13610548

SEQ ID NO: 113751 - protein, 123 aa, Arabidopsis thaliana; identical to SEQ ID NO: 23112
  peptide (1)..(123): Ceres Seq. ID no. 13610549

SEQ ID NO: 113752 - DNA, 1563 bp, Arabidopsis thaliana; identical to SEQ ID NO: 102513
  misc_feature (1)..(1563): Ceres Seq. ID no. 13610550
  misc_feature (1)..(1563): Ortholog of  Ceres SEQ ID NO 15169655 as cited in SEQ ID NO 64922
  misc_feature (1)..(1563): Ortholog of  Ceres SEQ ID NO 13596004 as cited in SEQ ID NO 68212

SEQ ID NO: 113753 - protein, 406 aa, Arabidopsis thaliana; identical to SEQ ID NO: 102514
  peptide (1)..(406): Ceres Seq. ID no. 13610551

SEQ ID NO: 113754 - protein, 307 aa, Arabidopsis thaliana; identical to SEQ ID NO: 102515
  peptide (1)..(307): Ceres Seq. ID no. 13610552

SEQ ID NO: 113755 - protein, 298 aa, Arabidopsis thaliana; identical to SEQ ID NO: 102516
  peptide (1)..(298): Ceres Seq. ID no. 13610553

SEQ ID NO: 113756 - DNA, 1444 bp, Arabidopsis thaliana; identical to SEQ ID NO: 102517
  misc_feature (1)..(1444): Ceres Seq. ID no. 13610566
  misc_feature (1)..(1444): Ortholog of  Ceres SEQ ID NO 14301576 as cited in SEQ ID NO 62362

SEQ ID NO: 113757 - protein, 382 aa, Arabidopsis thaliana; identical to SEQ ID NO: 25345
  peptide (1)..(382): Ceres Seq. ID no. 13610567

SEQ ID NO: 113758 - protein, 317 aa, Arabidopsis thaliana; identical to SEQ ID NO: 25346
  peptide (1)..(317): Ceres Seq. ID no. 13610568

SEQ ID NO: 113759 - DNA, 1519 bp, Arabidopsis thaliana; identical to SEQ ID NO: 102520
  misc_feature (1)..(1519): Ceres Seq. ID no. 13610569
  misc_feature (1)..(1519): Ortholog of  Ceres SEQ ID NO 13594345 as cited in SEQ ID NO 58043
  misc_feature (1)..(1519): Ortholog of  Ceres SEQ ID NO 13662880 as cited in SEQ ID NO 65422
  misc_feature (1)..(1519): Ortholog of  Ceres SEQ ID NO 12779098 as cited in SEQ ID NO 67698
  misc_feature (1)..(1519): Ortholog of  Ceres SEQ ID NO 13596180 as cited in SEQ ID NO 67941
  misc_feature (1)..(1519): Ortholog of  Ceres SEQ ID NO 13596089 as cited in SEQ ID NO 68373

SEQ ID NO: 113760 - protein, 461 aa, Arabidopsis thaliana; identical to SEQ ID NO: 102521
  peptide (1)..(461): Ceres Seq. ID no. 13610570

SEQ ID NO: 113761 - protein, 453 aa, Arabidopsis thaliana; identical to SEQ ID NO: 24482
  peptide (1)..(453): Ceres Seq. ID no. 13610571

SEQ ID NO: 113762 - protein, 375 aa, Arabidopsis thaliana; identical to SEQ ID NO: 24483
  peptide (1)..(375): Ceres Seq. ID no. 13610572

SEQ ID NO: 113763 - DNA, 1420 bp, Arabidopsis thaliana; identical to SEQ ID NO: 102524
  misc_feature (1)..(1420): Ceres Seq. ID no. 13610588
  misc_feature (1)..(1420): Ortholog of  Ceres SEQ ID NO 13582332 as cited in SEQ ID NO 59890
  misc_feature (1)..(1420): Ortholog of  Ceres SEQ ID NO 13598278 as cited in SEQ ID NO 68456

SEQ ID NO: 113764 - protein, 382 aa, Arabidopsis thaliana; identical to SEQ ID NO: 40365
  peptide (1)..(382): Ceres Seq. ID no. 13610589

SEQ ID NO: 113765 - protein, 367 aa, Arabidopsis thaliana; identical to SEQ ID NO: 40366
  peptide (1)..(367): Ceres Seq. ID no. 13610590

SEQ ID NO: 113766 - DNA, 1221 bp, Arabidopsis thaliana; identical to SEQ ID NO: 102527
  misc_feature (1)..(1221): Ceres Seq. ID no. 13610591
  misc_feature (1)..(1221): Ortholog of  Ceres SEQ ID NO 13596474 as cited in SEQ ID NO 62169
  misc_feature (1)..(1221): Ortholog of  Ceres SEQ ID NO 13598714 as cited in SEQ ID NO 62656
  misc_feature (1)..(1221): Ortholog of  Ceres SEQ ID NO 13596969 as cited in SEQ ID NO 63375
  misc_feature (1)..(1221): Ortholog of  Ceres SEQ ID NO 13597519 as cited in SEQ ID NO 64759
  misc_feature (1)..(1221): Ortholog of  Ceres SEQ ID NO 13597870 as cited in SEQ ID NO 64982
  misc_feature (1)..(1221): Ortholog of  Ceres SEQ ID NO 13656123 as cited in SEQ ID NO 65212

SEQ ID NO: 113767 - protein, 349 aa, Arabidopsis thaliana; identical to SEQ ID NO: 102528
  peptide (1)..(349): Ceres Seq. ID no. 13610592

SEQ ID NO: 113768 - protein, 218 aa, Arabidopsis thaliana; identical to SEQ ID NO: 102529
  peptide (1)..(218): Ceres Seq. ID no. 13610593

SEQ ID NO: 113769 - DNA, 1328 bp, Arabidopsis thaliana; identical to SEQ ID NO: 102530
  misc_feature (1)..(1328): Ceres Seq. ID no. 13610602
  misc_feature (1)..(1328): Ortholog of  Ceres SEQ ID NO 13660872 as cited in SEQ ID NO 60830
  misc_feature (1)..(1328): Ortholog of  Ceres SEQ ID NO 12616221 as cited in SEQ ID NO 63291

SEQ ID NO: 113770 - protein, 323 aa, Arabidopsis thaliana; identical to SEQ ID NO: 24690
  peptide (1)..(323): Ceres Seq. ID no. 13610603

SEQ ID NO: 113771 - protein, 320 aa, Arabidopsis thaliana; identical to SEQ ID NO: 24691
  peptide (1)..(320): Ceres Seq. ID no. 13610604

SEQ ID NO: 113772 - protein, 187 aa, Arabidopsis thaliana; identical to SEQ ID NO: 24692
  peptide (1)..(187): Ceres Seq. ID no. 13610605

SEQ ID NO: 113773 - DNA, 946 bp, Arabidopsis thaliana; identical to SEQ ID NO: 102534
  misc_feature (1)..(946): Ceres Seq. ID no. 13610606
  misc_feature (1)..(946): Ortholog of  Ceres SEQ ID NO 13658400 as cited in SEQ ID NO 66403

SEQ ID NO: 113774 - protein, 243 aa, Arabidopsis thaliana; identical to SEQ ID NO: 102535
  peptide (1)..(243): Ceres Seq. ID no. 13610607

SEQ ID NO: 113775 - protein, 226 aa, Arabidopsis thaliana; identical to SEQ ID NO: 73145
  peptide (1)..(226): Ceres Seq. ID no. 13610608

SEQ ID NO: 113776 - protein, 220 aa, Arabidopsis thaliana; identical to SEQ ID NO: 73146
  peptide (1)..(220): Ceres Seq. ID no. 13610609

SEQ ID NO: 113777 - DNA, 1502 bp, Arabidopsis thaliana; identical to SEQ ID NO: 102538
  misc_feature (1)..(1502): Ceres Seq. ID no. 13610614
  misc_feature (1)..(1502): Ortholog of  Ceres SEQ ID NO 15171245 as cited in SEQ ID NO 52264
  misc_feature (1)..(1502): Ortholog of  Ceres SEQ ID NO 14303576 as cited in SEQ ID NO 68428

SEQ ID NO: 113778 - protein, 472 aa, Arabidopsis thaliana; identical to SEQ ID NO: 102539
  peptide (1)..(472): Ceres Seq. ID no. 13610615

SEQ ID NO: 113779 - protein, 441 aa, Arabidopsis thaliana; identical to SEQ ID NO: 102540
  peptide (1)..(441): Ceres Seq. ID no. 13610616

SEQ ID NO: 113780 - protein, 397 aa, Arabidopsis thaliana; identical to SEQ ID NO: 102541
  peptide (1)..(397): Ceres Seq. ID no. 13610617

SEQ ID NO: 113781 - DNA, 1134 bp, Arabidopsis thaliana; identical to SEQ ID NO: 102542
  misc_feature (1)..(1134): Ceres Seq. ID no. 13610663
  misc_feature (1)..(1134): Ortholog of  Ceres SEQ ID NO 14303612 as cited in SEQ ID NO 63208

SEQ ID NO: 113782 - protein, 272 aa, Arabidopsis thaliana; identical to SEQ ID NO: 27277
  peptide (1)..(272): Ceres Seq. ID no. 13610664

SEQ ID NO: 113783 - protein, 269 aa, Arabidopsis thaliana; identical to SEQ ID NO: 27278
  peptide (1)..(269): Ceres Seq. ID no. 13610665

SEQ ID NO: 113784 - protein, 268 aa, Arabidopsis thaliana; identical to SEQ ID NO: 36494
  peptide (1)..(268): Ceres Seq. ID no. 13610666

SEQ ID NO: 113785 - DNA, 1170 bp, Arabidopsis thaliana; identical to SEQ ID NO: 102546
  misc_feature (1)..(1170): Ceres Seq. ID no. 13610679
  misc_feature (1)..(1170): Ortholog of  Ceres SEQ ID NO 14311576 as cited in SEQ ID NO 51551

SEQ ID NO: 113786 - protein, 283 aa, Arabidopsis thaliana; identical to SEQ ID NO: 41524
  peptide (1)..(283): Ceres Seq. ID no. 13610680

SEQ ID NO: 113787 - protein, 210 aa, Arabidopsis thaliana; identical to SEQ ID NO: 41525
  peptide (1)..(210): Ceres Seq. ID no. 13610681

SEQ ID NO: 113788 - protein, 194 aa, Arabidopsis thaliana; identical to SEQ ID NO: 41526
  peptide (1)..(194): Ceres Seq. ID no. 13610682

SEQ ID NO: 113789 - DNA, 1266 bp, Arabidopsis thaliana; identical to SEQ ID NO: 102550
  misc_feature (1)..(1266): Ceres Seq. ID no. 13610683
  misc_feature (1)..(1266): Ortholog of  Ceres SEQ ID NO 12607455 as cited in SEQ ID NO 55208

SEQ ID NO: 113790 - protein, 383 aa, Arabidopsis thaliana; identical to SEQ ID NO: 102551
  peptide (1)..(383): Ceres Seq. ID no. 13610684

SEQ ID NO: 113791 - protein, 365 aa, Arabidopsis thaliana; identical to SEQ ID NO: 102552
  peptide (1)..(365): Ceres Seq. ID no. 13610685

SEQ ID NO: 113792 - protein, 242 aa, Arabidopsis thaliana; identical to SEQ ID NO: 102553
  peptide (1)..(242): Ceres Seq. ID no. 13610686

SEQ ID NO: 113793 - DNA, 639 bp, Arabidopsis thaliana; identical to SEQ ID NO: 102554
  misc_feature (1)..(639): Ceres Seq. ID no. 13610687
  misc_feature (1)..(639): Ortholog of  Ceres SEQ ID NO 12597253 as cited in SEQ ID NO 62959
  misc_feature (1)..(639): Ortholog of  Ceres SEQ ID NO 15173341 as cited in SEQ ID NO 63800
  misc_feature (1)..(639): Ortholog of  Ceres SEQ ID NO 12635416 as cited in SEQ ID NO 0
  misc_feature (1)..(639): Ortholog of  Ceres SEQ ID NO 12635564 as cited in SEQ ID NO 0

SEQ ID NO: 113794 - protein, 132 aa, Arabidopsis thaliana; identical to SEQ ID NO: 30154
  peptide (1)..(132): Ceres Seq. ID no. 13610688

SEQ ID NO: 113795 - DNA, 968 bp, Arabidopsis thaliana; identical to SEQ ID NO: 102556
  misc_feature (1)..(968): Ceres Seq. ID no. 13610695
  misc_feature (1)..(968): Ortholog of  Ceres SEQ ID NO 12615268 as cited in SEQ ID NO 62391

SEQ ID NO: 113796 - protein, 202 aa, Arabidopsis thaliana; identical to SEQ ID NO: 102557
  peptide (1)..(202): Ceres Seq. ID no. 13610696

SEQ ID NO: 113797 - protein, 184 aa, Arabidopsis thaliana; identical to SEQ ID NO: 102558
  peptide (1)..(184): Ceres Seq. ID no. 13610697

SEQ ID NO: 113798 - DNA, 3268 bp, Arabidopsis thaliana; identical to SEQ ID NO: 102559
  misc_feature (1)..(3268): Ceres Seq. ID no. 13610710
  misc_feature (1)..(3268): Ortholog of  Ceres SEQ ID NO 12593464 as cited in SEQ ID NO 69039
  misc_feature (1)..(3268): Ortholog of  Ceres SEQ ID NO 13596244 as cited in SEQ ID NO 69307

SEQ ID NO: 113799 - protein, 440 aa, Arabidopsis thaliana; identical to SEQ ID NO: 36083
  peptide (1)..(440): Ceres Seq. ID no. 13610711

SEQ ID NO: 113800 - protein, 406 aa, Arabidopsis thaliana; identical to SEQ ID NO: 102561
  peptide (1)..(406): Ceres Seq. ID no. 13610712

SEQ ID NO: 113801 - protein, 403 aa, Arabidopsis thaliana; identical to SEQ ID NO: 102562
  peptide (1)..(403): Ceres Seq. ID no. 13610713

SEQ ID NO: 113802 - DNA, 2132 bp, Arabidopsis thaliana; identical to SEQ ID NO: 102563
  misc_feature (1)..(2132): Ceres Seq. ID no. 13610714
  misc_feature (1)..(2132): Ortholog of  Ceres SEQ ID NO 13654989 as cited in SEQ ID NO 63117
  misc_feature (1)..(2132): Ortholog of  Ceres SEQ ID NO 13584744 as cited in SEQ ID NO 69137

SEQ ID NO: 113803 - protein, 709 aa, Arabidopsis thaliana; identical to SEQ ID NO: 102564
  peptide (1)..(709): Ceres Seq. ID no. 13610715

SEQ ID NO: 113804 - protein, 677 aa, Arabidopsis thaliana; identical to SEQ ID NO: 102565
  peptide (1)..(677): Ceres Seq. ID no. 13610716

SEQ ID NO: 113805 - protein, 666 aa, Arabidopsis thaliana; identical to SEQ ID NO: 102566
  peptide (1)..(666): Ceres Seq. ID no. 13610717

SEQ ID NO: 113806 - DNA, 1462 bp, Arabidopsis thaliana; identical to SEQ ID NO: 102567
  misc_feature (1)..(1462): Ceres Seq. ID no. 13610718
  misc_feature (1)..(1462): Ortholog of  Ceres SEQ ID NO 13503499 as cited in SEQ ID NO 68684

SEQ ID NO: 113807 - protein, 267 aa, Arabidopsis thaliana; identical to SEQ ID NO: 39751
  peptide (1)..(267): Ceres Seq. ID no. 13610719

SEQ ID NO: 113808 - protein, 250 aa, Arabidopsis thaliana; identical to SEQ ID NO: 39752
  peptide (1)..(250): Ceres Seq. ID no. 13610720

SEQ ID NO: 113809 - protein, 210 aa, Arabidopsis thaliana; identical to SEQ ID NO: 39753
  peptide (1)..(210): Ceres Seq. ID no. 13610721

SEQ ID NO: 113810 - DNA, 1885 bp, Arabidopsis thaliana; identical to SEQ ID NO: 102571
  misc_feature (1)..(1885): Ceres Seq. ID no. 13610722
  misc_feature (1)..(1885): Ortholog of  Ceres SEQ ID NO 14314585 as cited in SEQ ID NO 59345

SEQ ID NO: 113811 - protein, 503 aa, Arabidopsis thaliana; identical to SEQ ID NO: 27376
  peptide (1)..(503): Ceres Seq. ID no. 13610723

SEQ ID NO: 113812 - protein, 446 aa, Arabidopsis thaliana; identical to SEQ ID NO: 27377
  peptide (1)..(446): Ceres Seq. ID no. 13610724

SEQ ID NO: 113813 - protein, 378 aa, Arabidopsis thaliana; identical to SEQ ID NO: 27378
  peptide (1)..(378): Ceres Seq. ID no. 13610725

SEQ ID NO: 113814 - DNA, 1176 bp, Arabidopsis thaliana; identical to SEQ ID NO: 102575
  misc_feature (1)..(1176): Ceres Seq. ID no. 13610726
  misc_feature (1)..(1176): Ortholog of  Ceres SEQ ID NO 12593170 as cited in SEQ ID NO 63263
  misc_feature (1)..(1176): Ortholog of  Ceres SEQ ID NO 14301882 as cited in SEQ ID NO 64381
  misc_feature (1)..(1176): Ortholog of  Ceres SEQ ID NO 13597851 as cited in SEQ ID NO 64869
  misc_feature (1)..(1176): Ortholog of  Ceres SEQ ID NO 13662420 as cited in SEQ ID NO 68680

SEQ ID NO: 113815 - protein, 289 aa, Arabidopsis thaliana; identical to SEQ ID NO: 36309
  peptide (1)..(289): Ceres Seq. ID no. 13610727

SEQ ID NO: 113816 - DNA, 2743 bp, Arabidopsis thaliana; identical to SEQ ID NO: 102577
  misc_feature (1)..(2743): Ceres Seq. ID no. 13610731
  misc_feature (1)..(2743): Ortholog of  Ceres SEQ ID NO 13582534 as cited in SEQ ID NO 57409
  misc_feature (1)..(2743): Ortholog of  Ceres SEQ ID NO 14302384 as cited in SEQ ID NO 67177

SEQ ID NO: 113817 - protein, 805 aa, Arabidopsis thaliana; identical to SEQ ID NO: 29256
  peptide (1)..(805): Ceres Seq. ID no. 13610732

SEQ ID NO: 113818 - protein, 803 aa, Arabidopsis thaliana; identical to SEQ ID NO: 29257
  peptide (1)..(803): Ceres Seq. ID no. 13610733

SEQ ID NO: 113819 - protein, 658 aa, Arabidopsis thaliana; identical to SEQ ID NO: 29258
  peptide (1)..(658): Ceres Seq. ID no. 13610734

SEQ ID NO: 113820 - DNA, 1122 bp, Arabidopsis thaliana; identical to SEQ ID NO: 102581
  misc_feature (1)..(1122): Ceres Seq. ID no. 13610735
  misc_feature (1)..(1122): Ortholog of  Ceres SEQ ID NO 13600601 as cited in SEQ ID NO 497
  misc_feature (1)..(1122): Ortholog of  Ceres SEQ ID NO 13664283 as cited in SEQ ID NO 61283
  misc_feature (1)..(1122): Ortholog of  Ceres SEQ ID NO 12635513 as cited in SEQ ID NO 0
  misc_feature (1)..(1122): Ortholog of  Ceres SEQ ID NO 15179333 as cited in SEQ ID NO 0

SEQ ID NO: 113821 - protein, 273 aa, Arabidopsis thaliana; identical to SEQ ID NO: 21964
  peptide (1)..(273): Ceres Seq. ID no. 13610736

SEQ ID NO: 113822 - protein, 166 aa, Arabidopsis thaliana; identical to SEQ ID NO: 21965
  peptide (1)..(166): Ceres Seq. ID no. 13610737

SEQ ID NO: 113823 - DNA, 1231 bp, Arabidopsis thaliana; identical to SEQ ID NO: 102584
  misc_feature (1)..(1231): Ceres Seq. ID no. 13610746
  misc_feature (1)..(1231): Ortholog of  Ceres SEQ ID NO 15225069 as cited in SEQ ID NO 68012
  misc_feature (1)..(1231): Ortholog of  Ceres SEQ ID NO 15179217 as cited in SEQ ID NO 0

SEQ ID NO: 113824 - protein, 310 aa, Arabidopsis thaliana; identical to SEQ ID NO: 102585
  peptide (1)..(310): Ceres Seq. ID no. 13610747

SEQ ID NO: 113825 - protein, 257 aa, Arabidopsis thaliana; identical to SEQ ID NO: 102586
  peptide (1)..(257): Ceres Seq. ID no. 13610748

SEQ ID NO: 113826 - protein, 210 aa, Arabidopsis thaliana; identical to SEQ ID NO: 102587
  peptide (1)..(210): Ceres Seq. ID no. 13610749

SEQ ID NO: 113827 - DNA, 1612 bp, Arabidopsis thaliana; identical to SEQ ID NO: 102588
  misc_feature (1)..(1612): Ceres Seq. ID no. 13610754
  misc_feature (1)..(1612): Ortholog of  Ceres SEQ ID NO 13655660 as cited in SEQ ID NO 63727

SEQ ID NO: 113828 - protein, 408 aa, Arabidopsis thaliana; identical to SEQ ID NO: 102589
  peptide (1)..(408): Ceres Seq. ID no. 13610755

SEQ ID NO: 113829 - protein, 278 aa, Arabidopsis thaliana; identical to SEQ ID NO: 102590
  peptide (1)..(278): Ceres Seq. ID no. 13610756

SEQ ID NO: 113830 - protein, 232 aa, Arabidopsis thaliana; identical to SEQ ID NO: 102591
  peptide (1)..(232): Ceres Seq. ID no. 13610757

SEQ ID NO: 113831 - DNA, 626 bp, Arabidopsis thaliana; identical to SEQ ID NO: 102592
  misc_feature (1)..(626): Ceres Seq. ID no. 13610762
  misc_feature (1)..(626): Ortholog of  Ceres SEQ ID NO 13600689 as cited in SEQ ID NO 0
  misc_feature (1)..(626): Ortholog of  Ceres SEQ ID NO 15178120 as cited in SEQ ID NO 0

SEQ ID NO: 113832 - protein, 119 aa, Arabidopsis thaliana; identical to SEQ ID NO: 30805
  peptide (1)..(119): Ceres Seq. ID no. 13610763

SEQ ID NO: 113833 - DNA, 1289 bp, Arabidopsis thaliana; identical to SEQ ID NO: 102594
  misc_feature (1)..(1289): Ceres Seq. ID no. 13610775
  misc_feature (1)..(1289): Ortholog of  Ceres SEQ ID NO 15173355 as cited in SEQ ID NO 61844

SEQ ID NO: 113834 - protein, 378 aa, Arabidopsis thaliana; identical to SEQ ID NO: 102595
  peptide (1)..(378): Ceres Seq. ID no. 13610776

SEQ ID NO: 113835 - protein, 241 aa, Arabidopsis thaliana; identical to SEQ ID NO: 102596
  peptide (1)..(241): Ceres Seq. ID no. 13610777

SEQ ID NO: 113836 - DNA, 1039 bp, Arabidopsis thaliana; identical to SEQ ID NO: 102597
  misc_feature (1)..(1039): Ceres Seq. ID no. 13610778
  misc_feature (1)..(1039): Ortholog of  Ceres SEQ ID NO 14311878 as cited in SEQ ID NO 51611

SEQ ID NO: 113837 - protein, 297 aa, Arabidopsis thaliana; identical to SEQ ID NO: 102598
  peptide (1)..(297): Ceres Seq. ID no. 13610779

SEQ ID NO: 113838 - protein, 283 aa, Arabidopsis thaliana; identical to SEQ ID NO: 102599
  peptide (1)..(283): Ceres Seq. ID no. 13610780

SEQ ID NO: 113839 - protein, 196 aa, Arabidopsis thaliana; identical to SEQ ID NO: 102600
  peptide (1)..(196): Ceres Seq. ID no. 13610781

SEQ ID NO: 113840 - DNA, 1839 bp, Arabidopsis thaliana; identical to SEQ ID NO: 102601
  misc_feature (1)..(1839): Ceres Seq. ID no. 13610782
  misc_feature (1)..(1839): Ortholog of  Ceres SEQ ID NO 14313897 as cited in SEQ ID NO 59695
  misc_feature (1)..(1839): Ortholog of  Ceres SEQ ID NO 13660049 as cited in SEQ ID NO 67010

SEQ ID NO: 113841 - protein, 421 aa, Arabidopsis thaliana; identical to SEQ ID NO: 23228
  peptide (1)..(421): Ceres Seq. ID no. 13610783

SEQ ID NO: 113842 - protein, 372 aa, Arabidopsis thaliana; identical to SEQ ID NO: 23229
  peptide (1)..(372): Ceres Seq. ID no. 13610784

SEQ ID NO: 113843 - protein, 363 aa, Arabidopsis thaliana; identical to SEQ ID NO: 23230
  peptide (1)..(363): Ceres Seq. ID no. 13610785

SEQ ID NO: 113844 - DNA, 846 bp, Arabidopsis thaliana; identical to SEQ ID NO: 102605
  misc_feature (1)..(846): Ceres Seq. ID no. 13610800
  misc_feature (1)..(846): Ortholog of  Ceres SEQ ID NO 12474478 as cited in SEQ ID NO 96
  misc_feature (1)..(846): Ortholog of  Ceres SEQ ID NO 14302025 as cited in SEQ ID NO 52138
  misc_feature (1)..(846): Ortholog of  Ceres SEQ ID NO 14309053 as cited in SEQ ID NO 0

SEQ ID NO: 113845 - protein, 217 aa, Arabidopsis thaliana; identical to SEQ ID NO: 102606
  peptide (1)..(217): Ceres Seq. ID no. 13610801

SEQ ID NO: 113846 - protein, 204 aa, Arabidopsis thaliana; identical to SEQ ID NO: 102607
  peptide (1)..(204): Ceres Seq. ID no. 13610802

SEQ ID NO: 113847 - DNA, 923 bp, Arabidopsis thaliana; identical to SEQ ID NO: 102608
  misc_feature (1)..(923): Ceres Seq. ID no. 13610803
  misc_feature (1)..(923): Ortholog of  Ceres SEQ ID NO 13594248 as cited in SEQ ID NO 57340

SEQ ID NO: 113848 - protein, 243 aa, Arabidopsis thaliana; identical to SEQ ID NO: 102609
  peptide (1)..(243): Ceres Seq. ID no. 13610804

SEQ ID NO: 113849 - protein, 236 aa, Arabidopsis thaliana; identical to SEQ ID NO: 26577
  peptide (1)..(236): Ceres Seq. ID no. 13610805

SEQ ID NO: 113850 - protein, 230 aa, Arabidopsis thaliana; identical to SEQ ID NO: 26578
  peptide (1)..(230): Ceres Seq. ID no. 13610806

SEQ ID NO: 113851 - DNA, 881 bp, Arabidopsis thaliana; identical to SEQ ID NO: 102612
  misc_feature (1)..(881): Ceres Seq. ID no. 13610810
  misc_feature (1)..(881): Ortholog of  Ceres SEQ ID NO 13594962 as cited in SEQ ID NO 56140
  misc_feature (1)..(881): Ortholog of  Ceres SEQ ID NO 13598378 as cited in SEQ ID NO 62631

SEQ ID NO: 113852 - protein, 116 aa, Arabidopsis thaliana; identical to SEQ ID NO: 37830
  peptide (1)..(116): Ceres Seq. ID no. 13610811

SEQ ID NO: 113853 - protein, 105 aa, Arabidopsis thaliana; identical to SEQ ID NO: 37831
  peptide (1)..(105): Ceres Seq. ID no. 13610812

SEQ ID NO: 113854 - protein, 76 aa, Arabidopsis thaliana; identical to SEQ ID NO: 41050
  peptide (1)..(76): Ceres Seq. ID no. 13610813

SEQ ID NO: 113855 - DNA, 1256 bp, Arabidopsis thaliana; identical to SEQ ID NO: 102616
  misc_feature (1)..(1256): Ceres Seq. ID no. 13610818
  misc_feature (1)..(1256): Ortholog of  Ceres SEQ ID NO 14316124 as cited in SEQ ID NO 50904
  misc_feature (1)..(1256): Ortholog of  Ceres SEQ ID NO 13585382 as cited in SEQ ID NO 63889

SEQ ID NO: 113856 - protein, 353 aa, Arabidopsis thaliana; identical to SEQ ID NO: 102617
  peptide (1)..(353): Ceres Seq. ID no. 13610819

SEQ ID NO: 113857 - protein, 326 aa, Arabidopsis thaliana; identical to SEQ ID NO: 102618
  peptide (1)..(326): Ceres Seq. ID no. 13610820

SEQ ID NO: 113858 - protein, 310 aa, Arabidopsis thaliana; identical to SEQ ID NO: 102619
  peptide (1)..(310): Ceres Seq. ID no. 13610821

SEQ ID NO: 113859 - DNA, 629 bp, Arabidopsis thaliana; identical to SEQ ID NO: 102620
  misc_feature (1)..(629): Ceres Seq. ID no. 13610826
  misc_feature (1)..(629): Ortholog of  Ceres SEQ ID NO 13584363 as cited in SEQ ID NO 64285

SEQ ID NO: 113860 - protein, 132 aa, Arabidopsis thaliana; identical to SEQ ID NO: 37958
  peptide (1)..(132): Ceres Seq. ID no. 13610827

SEQ ID NO: 113861 - protein, 119 aa, Arabidopsis thaliana; identical to SEQ ID NO: 37959
  peptide (1)..(119): Ceres Seq. ID no. 13610828

SEQ ID NO: 113862 - protein, 90 aa, Arabidopsis thaliana; identical to SEQ ID NO: 37960
  peptide (1)..(90): Ceres Seq. ID no. 13610829

SEQ ID NO: 113863 - DNA, 1489 bp, Arabidopsis thaliana; identical to SEQ ID NO: 102624
  misc_feature (1)..(1489): Ceres Seq. ID no. 13610838
  misc_feature (1)..(1489): Ortholog of  Ceres SEQ ID NO 13596891 as cited in SEQ ID NO 62868
  misc_feature (1)..(1489): Ortholog of  Ceres SEQ ID NO 12617235 as cited in SEQ ID NO 63990
  misc_feature (1)..(1489): Ortholog of  Ceres SEQ ID NO 13655371 as cited in SEQ ID NO 68945

SEQ ID NO: 113864 - protein, 459 aa, Arabidopsis thaliana; identical to SEQ ID NO: 102625
  peptide (1)..(459): Ceres Seq. ID no. 13610839

SEQ ID NO: 113865 - protein, 434 aa, Arabidopsis thaliana; identical to SEQ ID NO: 102626
  peptide (1)..(434): Ceres Seq. ID no. 13610840

SEQ ID NO: 113866 - protein, 414 aa, Arabidopsis thaliana; identical to SEQ ID NO: 102627
  peptide (1)..(414): Ceres Seq. ID no. 13610841

SEQ ID NO: 113867 - DNA, 1218 bp, Arabidopsis thaliana; identical to SEQ ID NO: 102628
  misc_feature (1)..(1218): Ceres Seq. ID no. 13610842
  misc_feature (1)..(1218): Ortholog of  Ceres SEQ ID NO 13662054 as cited in SEQ ID NO 61539
  misc_feature (1)..(1218): Ortholog of  Ceres SEQ ID NO 13663665 as cited in SEQ ID NO 67230
  misc_feature (1)..(1218): Ortholog of  Ceres SEQ ID NO 15174315 as cited in SEQ ID NO 0

SEQ ID NO: 113868 - protein, 288 aa, Arabidopsis thaliana; identical to SEQ ID NO: 102629
  peptide (1)..(288): Ceres Seq. ID no. 13610843

SEQ ID NO: 113869 - protein, 222 aa, Arabidopsis thaliana; identical to SEQ ID NO: 102630
  peptide (1)..(222): Ceres Seq. ID no. 13610844

SEQ ID NO: 113870 - DNA, 1322 bp, Arabidopsis thaliana; identical to SEQ ID NO: 102631
  misc_feature (1)..(1322): Ceres Seq. ID no. 13610845
  misc_feature (1)..(1322): Ortholog of  Ceres SEQ ID NO 13659644 as cited in SEQ ID NO 67118
  misc_feature (1)..(1322): Ortholog of  Ceres SEQ ID NO 14302856 as cited in SEQ ID NO 68824

SEQ ID NO: 113871 - protein, 370 aa, Arabidopsis thaliana; identical to SEQ ID NO: 102632
  peptide (1)..(370): Ceres Seq. ID no. 13610846

SEQ ID NO: 113872 - protein, 349 aa, Arabidopsis thaliana; identical to SEQ ID NO: 102633
  peptide (1)..(349): Ceres Seq. ID no. 13610847

SEQ ID NO: 113873 - protein, 343 aa, Arabidopsis thaliana; identical to SEQ ID NO: 102634
  peptide (1)..(343): Ceres Seq. ID no. 13610848

SEQ ID NO: 113874 - DNA, 844 bp, Arabidopsis thaliana; identical to SEQ ID NO: 102635
  misc_feature (1)..(844): Ceres Seq. ID no. 13610849
  misc_feature (1)..(844): Ortholog of  Ceres SEQ ID NO 13661801 as cited in SEQ ID NO 61655
  misc_feature (1)..(844): Ortholog of  Ceres SEQ ID NO 13596450 as cited in SEQ ID NO 68838

SEQ ID NO: 113875 - protein, 217 aa, Arabidopsis thaliana; identical to SEQ ID NO: 102636
  peptide (1)..(217): Ceres Seq. ID no. 13610850

SEQ ID NO: 113876 - protein, 204 aa, Arabidopsis thaliana; identical to SEQ ID NO: 30135
  peptide (1)..(204): Ceres Seq. ID no. 13610851

SEQ ID NO: 113877 - protein, 136 aa, Arabidopsis thaliana; identical to SEQ ID NO: 30136
  peptide (1)..(136): Ceres Seq. ID no. 13610852

SEQ ID NO: 113878 - DNA, 902 bp, Arabidopsis thaliana; identical to SEQ ID NO: 102639
  misc_feature (1)..(902): Ceres Seq. ID no. 13610853
  misc_feature (1)..(902): Ortholog of  Ceres SEQ ID NO 14314838 as cited in SEQ ID NO 52573

SEQ ID NO: 113879 - protein, 275 aa, Arabidopsis thaliana; identical to SEQ ID NO: 102640
  peptide (1)..(275): Ceres Seq. ID no. 13610854

SEQ ID NO: 113880 - protein, 270 aa, Arabidopsis thaliana; identical to SEQ ID NO: 21722
  peptide (1)..(270): Ceres Seq. ID no. 13610855

SEQ ID NO: 113881 - protein, 254 aa, Arabidopsis thaliana; identical to SEQ ID NO: 21723
  peptide (1)..(254): Ceres Seq. ID no. 13610856

SEQ ID NO: 113882 - DNA, 965 bp, Arabidopsis thaliana; identical to SEQ ID NO: 102643
  misc_feature (1)..(965): Ceres Seq. ID no. 13610857
  misc_feature (1)..(965): Ortholog of  Ceres SEQ ID NO 14314838 as cited in SEQ ID NO 52573

SEQ ID NO: 113883 - protein, 279 aa, Arabidopsis thaliana; identical to SEQ ID NO: 102644
  peptide (1)..(279): Ceres Seq. ID no. 13610858

SEQ ID NO: 113884 - protein, 274 aa, Arabidopsis thaliana; identical to SEQ ID NO: 102645
  peptide (1)..(274): Ceres Seq. ID no. 13610859

SEQ ID NO: 113885 - protein, 257 aa, Arabidopsis thaliana; identical to SEQ ID NO: 102646
  peptide (1)..(257): Ceres Seq. ID no. 13610860

SEQ ID NO: 113886 - DNA, 1215 bp, Arabidopsis thaliana; identical to SEQ ID NO: 102647
  misc_feature (1)..(1215): Ceres Seq. ID no. 13610865
  misc_feature (1)..(1215): Ortholog of  Ceres SEQ ID NO 15169005 as cited in SEQ ID NO 55180

SEQ ID NO: 113887 - protein, 355 aa, Arabidopsis thaliana; identical to SEQ ID NO: 102648
  peptide (1)..(355): Ceres Seq. ID no. 13610866

SEQ ID NO: 113888 - protein, 329 aa, Arabidopsis thaliana; identical to SEQ ID NO: 71900
  peptide (1)..(329): Ceres Seq. ID no. 13610867

SEQ ID NO: 113889 - protein, 324 aa, Arabidopsis thaliana; identical to SEQ ID NO: 71901
  peptide (1)..(324): Ceres Seq. ID no. 13610868

SEQ ID NO: 113890 - DNA, 1116 bp, Arabidopsis thaliana; identical to SEQ ID NO: 102651
  misc_feature (1)..(1116): Ceres Seq. ID no. 13610869
  misc_feature (1)..(1116): Ortholog of  Ceres SEQ ID NO 14306439 as cited in SEQ ID NO 53628
  misc_feature (1)..(1116): Ortholog of  Ceres SEQ ID NO 12611235 as cited in SEQ ID NO 56101
  misc_feature (1)..(1116): Ortholog of  Ceres SEQ ID NO 15226202 as cited in SEQ ID NO 65001
  misc_feature (1)..(1116): Ortholog of  Ceres SEQ ID NO 15177896 as cited in SEQ ID NO 0

SEQ ID NO: 113891 - protein, 256 aa, Arabidopsis thaliana; identical to SEQ ID NO: 30972
  peptide (1)..(256): Ceres Seq. ID no. 13610870

SEQ ID NO: 113892 - protein, 248 aa, Arabidopsis thaliana; identical to SEQ ID NO: 30973
  peptide (1)..(248): Ceres Seq. ID no. 13610871

SEQ ID NO: 113893 - protein, 240 aa, Arabidopsis thaliana; identical to SEQ ID NO: 30974
  peptide (1)..(240): Ceres Seq. ID no. 13610872

SEQ ID NO: 113894 - DNA, 829 bp, Arabidopsis thaliana; identical to SEQ ID NO: 102655
  misc_feature (1)..(829): Ceres Seq. ID no. 13610873
  misc_feature (1)..(829): Ortholog of  Ceres SEQ ID NO 13595532 as cited in SEQ ID NO 56705

SEQ ID NO: 113895 - protein, 170 aa, Arabidopsis thaliana; identical to SEQ ID NO: 102656
  peptide (1)..(170): Ceres Seq. ID no. 13610874

SEQ ID NO: 113896 - DNA, 1592 bp, Arabidopsis thaliana; identical to SEQ ID NO: 102657
  misc_feature (1)..(1592): Ceres Seq. ID no. 13610879
  misc_feature (1)..(1592): Ortholog of  Ceres SEQ ID NO 14312176 as cited in SEQ ID NO 59203

SEQ ID NO: 113897 - protein, 307 aa, Arabidopsis thaliana; identical to SEQ ID NO: 30864
  peptide (1)..(307): Ceres Seq. ID no. 13610880

SEQ ID NO: 113898 - protein, 300 aa, Arabidopsis thaliana; identical to SEQ ID NO: 30865
  peptide (1)..(300): Ceres Seq. ID no. 13610881

SEQ ID NO: 113899 - protein, 282 aa, Arabidopsis thaliana; identical to SEQ ID NO: 30866
  peptide (1)..(282): Ceres Seq. ID no. 13610882

SEQ ID NO: 113900 - DNA, 1172 bp, Arabidopsis thaliana; identical to SEQ ID NO: 102661
  misc_feature (1)..(1172): Ceres Seq. ID no. 13610891
  misc_feature (1)..(1172): Ortholog of  Ceres SEQ ID NO 14314442 as cited in SEQ ID NO 52358
  misc_feature (1)..(1172): Ortholog of  Ceres SEQ ID NO 12610442 as cited in SEQ ID NO 56281
  misc_feature (1)..(1172): Ortholog of  Ceres SEQ ID NO 12610713 as cited in SEQ ID NO 56591
  misc_feature (1)..(1172): Ortholog of  Ceres SEQ ID NO 12587345 as cited in SEQ ID NO 62844
  misc_feature (1)..(1172): Ortholog of  Ceres SEQ ID NO 13597357 as cited in SEQ ID NO 68961
  misc_feature (1)..(1172): Ortholog of  Ceres SEQ ID NO 13587656 as cited in SEQ ID NO 0
  misc_feature (1)..(1172): Ortholog of  Ceres SEQ ID NO 14309353 as cited in SEQ ID NO 0
  misc_feature (1)..(1172): Ortholog of  Ceres SEQ ID NO 15177686 as cited in SEQ ID NO 0

SEQ ID NO: 113901 - protein, 234 aa, Arabidopsis thaliana; identical to SEQ ID NO: 23037
  peptide (1)..(234): Ceres Seq. ID no. 13610892

SEQ ID NO: 113902 - DNA, 560 bp, Arabidopsis thaliana; identical to SEQ ID NO: 102663
  misc_feature (1)..(560): Ceres Seq. ID no. 13610893
  misc_feature (1)..(560): Ortholog of  Ceres SEQ ID NO 14309497 as cited in SEQ ID NO 0
  misc_feature (1)..(560): Ortholog of  Ceres SEQ ID NO 15180320 as cited in SEQ ID NO 0

SEQ ID NO: 113903 - protein, 152 aa, Arabidopsis thaliana; identical to SEQ ID NO: 36953
  peptide (1)..(152): Ceres Seq. ID no. 13610894

SEQ ID NO: 113904 - protein, 137 aa, Arabidopsis thaliana; identical to SEQ ID NO: 36954
  peptide (1)..(137): Ceres Seq. ID no. 13610895

SEQ ID NO: 113905 - protein, 133 aa, Arabidopsis thaliana; identical to SEQ ID NO: 36955
  peptide (1)..(133): Ceres Seq. ID no. 13610896

SEQ ID NO: 113906 - DNA, 1333 bp, Arabidopsis thaliana; identical to SEQ ID NO: 102667
  misc_feature (1)..(1333): Ceres Seq. ID no. 13610897
  misc_feature (1)..(1333): Ortholog of  Ceres SEQ ID NO 12578784 as cited in SEQ ID NO 20729
  misc_feature (1)..(1333): Ortholog of  Ceres SEQ ID NO 13658847 as cited in SEQ ID NO 66674

SEQ ID NO: 113907 - protein, 332 aa, Arabidopsis thaliana; identical to SEQ ID NO: 35710
  peptide (1)..(332): Ceres Seq. ID no. 13610898

SEQ ID NO: 113908 - protein, 282 aa, Arabidopsis thaliana; identical to SEQ ID NO: 35711
  peptide (1)..(282): Ceres Seq. ID no. 13610899

SEQ ID NO: 113909 - protein, 276 aa, Arabidopsis thaliana; identical to SEQ ID NO: 35712
  peptide (1)..(276): Ceres Seq. ID no. 13610900

SEQ ID NO: 113910 - DNA, 656 bp, Arabidopsis thaliana; identical to SEQ ID NO: 102671
  misc_feature (1)..(656): Ceres Seq. ID no. 13610905
  misc_feature (1)..(656): Ortholog of  Ceres SEQ ID NO 13622871 as cited in SEQ ID NO 0

SEQ ID NO: 113911 - protein, 118 aa, Arabidopsis thaliana; identical to SEQ ID NO: 21264
  peptide (1)..(118): Ceres Seq. ID no. 13610906

SEQ ID NO: 113912 - protein, 109 aa, Arabidopsis thaliana; identical to SEQ ID NO: 21265
  peptide (1)..(109): Ceres Seq. ID no. 13610907

SEQ ID NO: 113913 - protein, 66 aa, Arabidopsis thaliana; identical to SEQ ID NO: 21266
  peptide (1)..(66): Ceres Seq. ID no. 13610908

SEQ ID NO: 113914 - DNA, 2729 bp, Arabidopsis thaliana; identical to SEQ ID NO: 102675
  misc_feature (1)..(2729): Ceres Seq. ID no. 13610909
  misc_feature (1)..(2729): Ortholog of  Ceres SEQ ID NO 13597957 as cited in SEQ ID NO 60744

SEQ ID NO: 113915 - protein, 774 aa, Arabidopsis thaliana; identical to SEQ ID NO: 102676
  peptide (1)..(774): Ceres Seq. ID no. 13610910

SEQ ID NO: 113916 - protein, 751 aa, Arabidopsis thaliana; identical to SEQ ID NO: 102677
  peptide (1)..(751): Ceres Seq. ID no. 13610911

SEQ ID NO: 113917 - protein, 737 aa, Arabidopsis thaliana; identical to SEQ ID NO: 102678
  peptide (1)..(737): Ceres Seq. ID no. 13610912

SEQ ID NO: 113918 - DNA, 1916 bp, Arabidopsis thaliana; identical to SEQ ID NO: 102679
  misc_feature (1)..(1916): Ceres Seq. ID no. 13610921
  misc_feature (1)..(1916): Ortholog of  Ceres SEQ ID NO 13600220 as cited in SEQ ID NO 0

SEQ ID NO: 113919 - protein, 528 aa, Arabidopsis thaliana [sequence omitted]

SEQ ID NO: 113920 - protein, 457 aa, Arabidopsis thaliana; identical to SEQ ID NO: 36062
  peptide (1)..(457): Ceres Seq. ID no. 13610923

SEQ ID NO: 113921 - protein, 423 aa, Arabidopsis thaliana; identical to SEQ ID NO: 36063
  peptide (1)..(423): Ceres Seq. ID no. 13610924

SEQ ID NO: 113922 - DNA, 776 bp, Arabidopsis thaliana; identical to SEQ ID NO: 102683
  misc_feature (1)..(776): Ceres Seq. ID no. 13610933
  misc_feature (1)..(776): Ortholog of  Ceres SEQ ID NO 14311545 as cited in SEQ ID NO 51451

SEQ ID NO: 113923 - protein, 172 aa, Arabidopsis thaliana; identical to SEQ ID NO: 25746
  peptide (1)..(172): Ceres Seq. ID no. 13610934

SEQ ID NO: 113924 - protein, 117 aa, Arabidopsis thaliana; identical to SEQ ID NO: 25747
  peptide (1)..(117): Ceres Seq. ID no. 13610935

SEQ ID NO: 113925 - DNA, 765 bp, Arabidopsis thaliana; identical to SEQ ID NO: 102686
  misc_feature (1)..(765): Ceres Seq. ID no. 13610960
  misc_feature (1)..(765): Ortholog of  Ceres SEQ ID NO 13662677 as cited in SEQ ID NO 63824

SEQ ID NO: 113926 - protein, 192 aa, Arabidopsis thaliana; identical to SEQ ID NO: 102687
  peptide (1)..(192): Ceres Seq. ID no. 13610961

SEQ ID NO: 113927 - protein, 175 aa, Arabidopsis thaliana; identical to SEQ ID NO: 102688
  peptide (1)..(175): Ceres Seq. ID no. 13610962

SEQ ID NO: 113928 - protein, 106 aa, Arabidopsis thaliana; identical to SEQ ID NO: 102689
  peptide (1)..(106): Ceres Seq. ID no. 13610963

SEQ ID NO: 113929 - DNA, 1615 bp, Arabidopsis thaliana; identical to SEQ ID NO: 102690
  misc_feature (1)..(1615): Ceres Seq. ID no. 13610972
  misc_feature (1)..(1615): Ortholog of  Ceres SEQ ID NO 14308598 as cited in SEQ ID NO 60416
  misc_feature (1)..(1615): Ortholog of  Ceres SEQ ID NO 13502952 as cited in SEQ ID NO 62271
  misc_feature (1)..(1615): Ortholog of  Ceres SEQ ID NO 13502973 as cited in SEQ ID NO 68052
  misc_feature (1)..(1615): Ortholog of  Ceres SEQ ID NO 13596000 as cited in SEQ ID NO 68188

SEQ ID NO: 113930 - protein, 482 aa, Arabidopsis thaliana; identical to SEQ ID NO: 102691
  peptide (1)..(482): Ceres Seq. ID no. 13610973

SEQ ID NO: 113931 - protein, 462 aa, Arabidopsis thaliana; identical to SEQ ID NO: 25940
  peptide (1)..(462): Ceres Seq. ID no. 13610974

SEQ ID NO: 113932 - protein, 455 aa, Arabidopsis thaliana; identical to SEQ ID NO: 25941
  peptide (1)..(455): Ceres Seq. ID no. 13610975

SEQ ID NO: 113933 - DNA, 1475 bp, Arabidopsis thaliana; identical to SEQ ID NO: 102694
  misc_feature (1)..(1475): Ceres Seq. ID no. 13610984
  misc_feature (1)..(1475): Ortholog of  Ceres SEQ ID NO 15170155 as cited in SEQ ID NO 64363

SEQ ID NO: 113934 - protein, 382 aa, Arabidopsis thaliana; identical to SEQ ID NO: 102695
  peptide (1)..(382): Ceres Seq. ID no. 13610985

SEQ ID NO: 113935 - protein, 380 aa, Arabidopsis thaliana; identical to SEQ ID NO: 102696
  peptide (1)..(380): Ceres Seq. ID no. 13610986

SEQ ID NO: 113936 - protein, 355 aa, Arabidopsis thaliana; identical to SEQ ID NO: 102697
  peptide (1)..(355): Ceres Seq. ID no. 13610987

SEQ ID NO: 113937 - DNA, 1582 bp, Arabidopsis thaliana; identical to SEQ ID NO: 102698
  misc_feature (1)..(1582): Ceres Seq. ID no. 13611006
  misc_feature (1)..(1582): Ortholog of  Ceres SEQ ID NO 15169350 as cited in SEQ ID NO 53271

SEQ ID NO: 113938 - protein, 381 aa, Arabidopsis thaliana; identical to SEQ ID NO: 102699
  peptide (1)..(381): Ceres Seq. ID no. 13611007

SEQ ID NO: 113939 - protein, 338 aa, Arabidopsis thaliana; identical to SEQ ID NO: 102700
  peptide (1)..(338): Ceres Seq. ID no. 13611008

SEQ ID NO: 113940 - protein, 337 aa, Arabidopsis thaliana; identical to SEQ ID NO: 102701
  peptide (1)..(337): Ceres Seq. ID no. 13611009

SEQ ID NO: 113941 - DNA, 1394 bp, Arabidopsis thaliana; identical to SEQ ID NO: 102702
  misc_feature (1)..(1394): Ceres Seq. ID no. 13611010
  misc_feature (1)..(1394): Ortholog of  Ceres SEQ ID NO 14312844 as cited in SEQ ID NO 55601
  misc_feature (1)..(1394): Ortholog of  Ceres SEQ ID NO 14312866 as cited in SEQ ID NO 55630
  misc_feature (1)..(1394): Ortholog of  Ceres SEQ ID NO 13597376 as cited in SEQ ID NO 64002
  misc_feature (1)..(1394): Ortholog of  Ceres SEQ ID NO 13503573 as cited in SEQ ID NO 65402
  misc_feature (1)..(1394): Ortholog of  Ceres SEQ ID NO 13659615 as cited in SEQ ID NO 67248

SEQ ID NO: 113942 - protein, 351 aa, Arabidopsis thaliana; identical to SEQ ID NO: 102703
  peptide (1)..(351): Ceres Seq. ID no. 13611011

SEQ ID NO: 113943 - protein, 231 aa, Arabidopsis thaliana; identical to SEQ ID NO: 102704
  peptide (1)..(231): Ceres Seq. ID no. 13611012

SEQ ID NO: 113944 - protein, 224 aa, Arabidopsis thaliana; identical to SEQ ID NO: 102705
  peptide (1)..(224): Ceres Seq. ID no. 13611013

SEQ ID NO: 113945 - DNA, 1339 bp, Arabidopsis thaliana; identical to SEQ ID NO: 102706
  misc_feature (1)..(1339): Ceres Seq. ID no. 13611018
  misc_feature (1)..(1339): Ortholog of  Ceres SEQ ID NO 14313060 as cited in SEQ ID NO 59447
  misc_feature (1)..(1339): Ortholog of  Ceres SEQ ID NO 12624676 as cited in SEQ ID NO 61197

SEQ ID NO: 113946 - protein, 374 aa, Arabidopsis thaliana; identical to SEQ ID NO: 102707
  peptide (1)..(374): Ceres Seq. ID no. 13611019

SEQ ID NO: 113947 - protein, 305 aa, Arabidopsis thaliana; identical to SEQ ID NO: 102708
  peptide (1)..(305): Ceres Seq. ID no. 13611020

SEQ ID NO: 113948 - protein, 294 aa, Arabidopsis thaliana; identical to SEQ ID NO: 102709
  peptide (1)..(294): Ceres Seq. ID no. 13611021

SEQ ID NO: 113949 - DNA, 1053 bp, Arabidopsis thaliana; identical to SEQ ID NO: 102710
  misc_feature (1)..(1053): Ceres Seq. ID no. 13611041
  misc_feature (1)..(1053): Ortholog of  Ceres SEQ ID NO 13594252 as cited in SEQ ID NO 57528
  misc_feature (1)..(1053): Ortholog of  Ceres SEQ ID NO 14315060 as cited in SEQ ID NO 60039
  misc_feature (1)..(1053): Ortholog of  Ceres SEQ ID NO 13597809 as cited in SEQ ID NO 64598
  misc_feature (1)..(1053): Ortholog of  Ceres SEQ ID NO 12617960 as cited in SEQ ID NO 69051
  misc_feature (1)..(1053): Ortholog of  Ceres SEQ ID NO 13589401 as cited in SEQ ID NO 0
  misc_feature (1)..(1053): Ortholog of  Ceres SEQ ID NO 15179361 as cited in SEQ ID NO 0

SEQ ID NO: 113950 - protein, 283 aa, Arabidopsis thaliana; identical to SEQ ID NO: 102711
  peptide (1)..(283): Ceres Seq. ID no. 13611042

SEQ ID NO: 113951 - protein, 255 aa, Arabidopsis thaliana; identical to SEQ ID NO: 38059
  peptide (1)..(255): Ceres Seq. ID no. 13611043

SEQ ID NO: 113952 - protein, 244 aa, Arabidopsis thaliana; identical to SEQ ID NO: 38060
  peptide (1)..(244): Ceres Seq. ID no. 13611044

SEQ ID NO: 113953 - DNA, 869 bp, Arabidopsis thaliana; identical to SEQ ID NO: 102714
  misc_feature (1)..(869): Ceres Seq. ID no. 13611045
  misc_feature (1)..(869): Ortholog of  Ceres SEQ ID NO 12584790 as cited in SEQ ID NO 62648

SEQ ID NO: 113954 - protein, 148 aa, Arabidopsis thaliana; identical to SEQ ID NO: 23173
  peptide (1)..(148): Ceres Seq. ID no. 13611046

SEQ ID NO: 113955 - protein, 119 aa, Arabidopsis thaliana; identical to SEQ ID NO: 23174
  peptide (1)..(119): Ceres Seq. ID no. 13611047

SEQ ID NO: 113956 - protein, 111 aa, Arabidopsis thaliana; identical to SEQ ID NO: 23175
  peptide (1)..(111): Ceres Seq. ID no. 13611048

SEQ ID NO: 113957 - DNA, 1486 bp, Arabidopsis thaliana; identical to SEQ ID NO: 102718
  misc_feature (1)..(1486): Ceres Seq. ID no. 13611057
  misc_feature (1)..(1486): Ortholog of  Ceres SEQ ID NO 14312844 as cited in SEQ ID NO 55601
  misc_feature (1)..(1486): Ortholog of  Ceres SEQ ID NO 14312866 as cited in SEQ ID NO 55630
  misc_feature (1)..(1486): Ortholog of  Ceres SEQ ID NO 13597376 as cited in SEQ ID NO 64002
  misc_feature (1)..(1486): Ortholog of  Ceres SEQ ID NO 13503573 as cited in SEQ ID NO 65402
  misc_feature (1)..(1486): Ortholog of  Ceres SEQ ID NO 13659615 as cited in SEQ ID NO 67248

SEQ ID NO: 113958 - protein, 402 aa, Arabidopsis thaliana; identical to SEQ ID NO: 102719
  peptide (1)..(402): Ceres Seq. ID no. 13611058

SEQ ID NO: 113959 - protein, 348 aa, Arabidopsis thaliana; identical to SEQ ID NO: 102720
  peptide (1)..(348): Ceres Seq. ID no. 13611059

SEQ ID NO: 113960 - protein, 266 aa, Arabidopsis thaliana; identical to SEQ ID NO: 102721
  peptide (1)..(266): Ceres Seq. ID no. 13611060

SEQ ID NO: 113961 - DNA, 713 bp, Arabidopsis thaliana; identical to SEQ ID NO: 102722
  misc_feature (1)..(713): Ceres Seq. ID no. 13611076
  misc_feature (1)..(713): Ortholog of  Ceres SEQ ID NO 13495070 as cited in SEQ ID NO 53216
  misc_feature (1)..(713): Ortholog of  Ceres SEQ ID NO 13661333 as cited in SEQ ID NO 61620
  misc_feature (1)..(713): Ortholog of  Ceres SEQ ID NO 13596812 as cited in SEQ ID NO 62283
  misc_feature (1)..(713): Ortholog of  Ceres SEQ ID NO 13623021 as cited in SEQ ID NO 0
  misc_feature (1)..(713): Ortholog of  Ceres SEQ ID NO 14309080 as cited in SEQ ID NO 0

SEQ ID NO: 113962 - protein, 150 aa, Arabidopsis thaliana; identical to SEQ ID NO: 28254
  peptide (1)..(150): Ceres Seq. ID no. 13611077

SEQ ID NO: 113963 - protein, 132 aa, Arabidopsis thaliana; identical to SEQ ID NO: 26127
  peptide (1)..(132): Ceres Seq. ID no. 13611078

SEQ ID NO: 113964 - DNA, 683 bp, Arabidopsis thaliana; identical to SEQ ID NO: 102725
  misc_feature (1)..(683): Ceres Seq. ID no. 13611079
  misc_feature (1)..(683): Ortholog of  Ceres SEQ ID NO 14314198 as cited in SEQ ID NO 57472
  misc_feature (1)..(683): Ortholog of  Ceres SEQ ID NO 12783998 as cited in SEQ ID NO 61535
  misc_feature (1)..(683): Ortholog of  Ceres SEQ ID NO 15174264 as cited in SEQ ID NO 61877

SEQ ID NO: 113965 - protein, 145 aa, Arabidopsis thaliana; identical to SEQ ID NO: 21275
  peptide (1)..(145): Ceres Seq. ID no. 13611080

SEQ ID NO: 113966 - protein, 96 aa, Arabidopsis thaliana; identical to SEQ ID NO: 21276
  peptide (1)..(96): Ceres Seq. ID no. 13611081

SEQ ID NO: 113967 - DNA, 1206 bp, Arabidopsis thaliana; identical to SEQ ID NO: 102728
  misc_feature (1)..(1206): Ceres Seq. ID no. 13611104
  misc_feature (1)..(1206): Ortholog of  Ceres SEQ ID NO 14307053 as cited in SEQ ID NO 54262

SEQ ID NO: 113968 - protein, 307 aa, Arabidopsis thaliana; identical to SEQ ID NO: 40556
  peptide (1)..(307): Ceres Seq. ID no. 13611105

SEQ ID NO: 113969 - protein, 305 aa, Arabidopsis thaliana; identical to SEQ ID NO: 40557
  peptide (1)..(305): Ceres Seq. ID no. 13611106

SEQ ID NO: 113970 - protein, 304 aa, Arabidopsis thaliana; identical to SEQ ID NO: 40558
  peptide (1)..(304): Ceres Seq. ID no. 13611107

SEQ ID NO: 113971 - DNA, 496 bp, Arabidopsis thaliana; identical to SEQ ID NO: 102732
  misc_feature (1)..(496): Ceres Seq. ID no. 13611108
  misc_feature (1)..(496): Ortholog of  Ceres SEQ ID NO 13586586 as cited in SEQ ID NO 0

SEQ ID NO: 113972 - protein, 93 aa, Arabidopsis thaliana; identical to SEQ ID NO: 28221
  peptide (1)..(93): Ceres Seq. ID no. 13611109

SEQ ID NO: 113973 - protein, 89 aa, Arabidopsis thaliana; identical to SEQ ID NO: 28222
  peptide (1)..(89): Ceres Seq. ID no. 13611110

SEQ ID NO: 113974 - protein, 88 aa, Arabidopsis thaliana; identical to SEQ ID NO: 28223
  peptide (1)..(88): Ceres Seq. ID no. 13611111

SEQ ID NO: 113975 - DNA, 1740 bp, Arabidopsis thaliana; identical to SEQ ID NO: 102736
  misc_feature (1)..(1740): Ceres Seq. ID no. 13611120
  misc_feature (1)..(1740): Ortholog of  Ceres SEQ ID NO 13595747 as cited in SEQ ID NO 58679

SEQ ID NO: 113976 - protein, 510 aa, Arabidopsis thaliana; identical to SEQ ID NO: 102737
  peptide (1)..(510): Ceres Seq. ID no. 13611121

SEQ ID NO: 113977 - protein, 444 aa, Arabidopsis thaliana; identical to SEQ ID NO: 102738
  peptide (1)..(444): Ceres Seq. ID no. 13611122

SEQ ID NO: 113978 - DNA, 1164 bp, Arabidopsis thaliana; identical to SEQ ID NO: 102739
  misc_feature (1)..(1164): Ceres Seq. ID no. 13611135
  misc_feature (1)..(1164): Ortholog of  Ceres SEQ ID NO 12611829 as cited in SEQ ID NO 56771
  misc_feature (1)..(1164): Ortholog of  Ceres SEQ ID NO 15171735 as cited in SEQ ID NO 57234
  misc_feature (1)..(1164): Ortholog of  Ceres SEQ ID NO 13597018 as cited in SEQ ID NO 64288
  misc_feature (1)..(1164): Ortholog of  Ceres SEQ ID NO 14305124 as cited in SEQ ID NO 0

SEQ ID NO: 113979 - protein, 283 aa, Arabidopsis thaliana; identical to SEQ ID NO: 86076
  peptide (1)..(283): Ceres Seq. ID no. 13611136

SEQ ID NO: 113980 - protein, 238 aa, Arabidopsis thaliana; identical to SEQ ID NO: 86077
  peptide (1)..(238): Ceres Seq. ID no. 13611137

SEQ ID NO: 113981 - DNA, 4260 bp, Arabidopsis thaliana; identical to SEQ ID NO: 102742
  misc_feature (1)..(4260): Ceres Seq. ID no. 13611138
  misc_feature (1)..(4260): Ortholog of  Ceres SEQ ID NO 15177611 as cited in SEQ ID NO 59034

SEQ ID NO: 113982 - protein, 1291 aa, Arabidopsis thaliana; identical to SEQ ID NO: 102743
  peptide (1)..(1291): Ceres Seq. ID no. 13611139

SEQ ID NO: 113983 - protein, 1246 aa, Arabidopsis thaliana; identical to SEQ ID NO: 102744
  peptide (1)..(1246): Ceres Seq. ID no. 13611140

SEQ ID NO: 113984 - protein, 1186 aa, Arabidopsis thaliana; identical to SEQ ID NO: 102745
  peptide (1)..(1186): Ceres Seq. ID no. 13611141

SEQ ID NO: 113985 - DNA, 1129 bp, Arabidopsis thaliana; identical to SEQ ID NO: 102746
  misc_feature (1)..(1129): Ceres Seq. ID no. 13611142
  misc_feature (1)..(1129): Ortholog of  Ceres SEQ ID NO 13594740 as cited in SEQ ID NO 51721
  misc_feature (1)..(1129): Ortholog of  Ceres SEQ ID NO 14316497 as cited in SEQ ID NO 58285
  misc_feature (1)..(1129): Ortholog of  Ceres SEQ ID NO 13595944 as cited in SEQ ID NO 68153

SEQ ID NO: 113986 - protein, 352 aa, Arabidopsis thaliana; identical to SEQ ID NO: 102747
  peptide (1)..(352): Ceres Seq. ID no. 13611143

SEQ ID NO: 113987 - protein, 336 aa, Arabidopsis thaliana; identical to SEQ ID NO: 29307
  peptide (1)..(336): Ceres Seq. ID no. 13611144

SEQ ID NO: 113988 - protein, 270 aa, Arabidopsis thaliana; identical to SEQ ID NO: 29308
  peptide (1)..(270): Ceres Seq. ID no. 13611145

SEQ ID NO: 113989 - DNA, 753 bp, Arabidopsis thaliana; identical to SEQ ID NO: 102750
  misc_feature (1)..(753): Ceres Seq. ID no. 13611158
  misc_feature (1)..(753): Ortholog of  Ceres SEQ ID NO 15173624 as cited in SEQ ID NO 60470

SEQ ID NO: 113990 - protein, 199 aa, Arabidopsis thaliana; identical to SEQ ID NO: 30300
  peptide (1)..(199): Ceres Seq. ID no. 13611159

SEQ ID NO: 113991 - protein, 147 aa, Arabidopsis thaliana; identical to SEQ ID NO: 30301
  peptide (1)..(147): Ceres Seq. ID no. 13611160

SEQ ID NO: 113992 - protein, 115 aa, Arabidopsis thaliana; identical to SEQ ID NO: 30302
  peptide (1)..(115): Ceres Seq. ID no. 13611161

SEQ ID NO: 113993 - DNA, 1004 bp, Arabidopsis thaliana; identical to SEQ ID NO: 102754
  misc_feature (1)..(1004): Ceres Seq. ID no. 13611166
  misc_feature (1)..(1004): Ortholog of  Ceres SEQ ID NO 15170745 as cited in SEQ ID NO 52595

SEQ ID NO: 113994 - protein, 269 aa, Arabidopsis thaliana; identical to SEQ ID NO: 37175
  peptide (1)..(269): Ceres Seq. ID no. 13611167

SEQ ID NO: 113995 - protein, 259 aa, Arabidopsis thaliana; identical to SEQ ID NO: 37176
  peptide (1)..(259): Ceres Seq. ID no. 13611168

SEQ ID NO: 113996 - protein, 155 aa, Arabidopsis thaliana; identical to SEQ ID NO: 37177
  peptide (1)..(155): Ceres Seq. ID no. 13611169

SEQ ID NO: 113997 - DNA, 1033 bp, Arabidopsis thaliana; identical to SEQ ID NO: 102758
  misc_feature (1)..(1033): Ceres Seq. ID no. 13611185
  misc_feature (1)..(1033): Ortholog of  Ceres SEQ ID NO 12635513 as cited in SEQ ID NO 0

SEQ ID NO: 113998 - protein, 258 aa, Arabidopsis thaliana; identical to SEQ ID NO: 40172
  peptide (1)..(258): Ceres Seq. ID no. 13611186

SEQ ID NO: 113999 - protein, 256 aa, Arabidopsis thaliana; identical to SEQ ID NO: 40173
  peptide (1)..(256): Ceres Seq. ID no. 13611187

SEQ ID NO: 114000 - protein, 149 aa, Arabidopsis thaliana; identical to SEQ ID NO: 40174
  peptide (1)..(149): Ceres Seq. ID no. 13611188

SEQ ID NO: 114001 - DNA, 1982 bp, Arabidopsis thaliana; identical to SEQ ID NO: 102762
  misc_feature (1)..(1982): Ceres Seq. ID no. 13611193
  misc_feature (1)..(1982): Ortholog of  Ceres SEQ ID NO 15226493 as cited in SEQ ID NO 59078

SEQ ID NO: 114002 - protein, 515 aa, Arabidopsis thaliana; identical to SEQ ID NO: 102763
  peptide (1)..(515): Ceres Seq. ID no. 13611194

SEQ ID NO: 114003 - protein, 512 aa, Arabidopsis thaliana; identical to SEQ ID NO: 102764
  peptide (1)..(512): Ceres Seq. ID no. 13611195

SEQ ID NO: 114004 - protein, 501 aa, Arabidopsis thaliana; identical to SEQ ID NO: 102765
  peptide (1)..(501): Ceres Seq. ID no. 13611196

SEQ ID NO: 114005 - DNA, 1549 bp, Arabidopsis thaliana; identical to SEQ ID NO: 102766
  misc_feature (1)..(1549): Ceres Seq. ID no. 13611201
  misc_feature (1)..(1549): Ortholog of  Ceres SEQ ID NO 14316049 as cited in SEQ ID NO 67036
  misc_feature (1)..(1549): Ortholog of  Ceres SEQ ID NO 14313252 as cited in SEQ ID NO 67134

SEQ ID NO: 114006 - protein, 420 aa, Arabidopsis thaliana; identical to SEQ ID NO: 102767
  peptide (1)..(420): Ceres Seq. ID no. 13611202

SEQ ID NO: 114007 - protein, 297 aa, Arabidopsis thaliana; identical to SEQ ID NO: 38140
  peptide (1)..(297): Ceres Seq. ID no. 13611203

SEQ ID NO: 114008 - protein, 294 aa, Arabidopsis thaliana; identical to SEQ ID NO: 38141
  peptide (1)..(294): Ceres Seq. ID no. 13611204

SEQ ID NO: 114009 - DNA, 1122 bp, Arabidopsis thaliana; identical to SEQ ID NO: 102770
  misc_feature (1)..(1122): Ceres Seq. ID no. 13611209
  misc_feature (1)..(1122): Ortholog of  Ceres SEQ ID NO 14314252 as cited in SEQ ID NO 57492
  misc_feature (1)..(1122): Ortholog of  Ceres SEQ ID NO 12608276 as cited in SEQ ID NO 57871
  misc_feature (1)..(1122): Ortholog of  Ceres SEQ ID NO 13598492 as cited in SEQ ID NO 63882
  misc_feature (1)..(1122): Ortholog of  Ceres SEQ ID NO 13657914 as cited in SEQ ID NO 66230
  misc_feature (1)..(1122): Ortholog of  Ceres SEQ ID NO 13595877 as cited in SEQ ID NO 67702
  misc_feature (1)..(1122): Ortholog of  Ceres SEQ ID NO 13622667 as cited in SEQ ID NO 0

SEQ ID NO: 114010 - protein, 327 aa, Arabidopsis thaliana; identical to SEQ ID NO: 102771
  peptide (1)..(327): Ceres Seq. ID no. 13611210

SEQ ID NO: 114011 - protein, 314 aa, Arabidopsis thaliana; identical to SEQ ID NO: 102772
  peptide (1)..(314): Ceres Seq. ID no. 13611211

SEQ ID NO: 114012 - protein, 240 aa, Arabidopsis thaliana; identical to SEQ ID NO: 102773
  peptide (1)..(240): Ceres Seq. ID no. 13611212

SEQ ID NO: 114013 - DNA, 1000 bp, Arabidopsis thaliana; identical to SEQ ID NO: 102774
  misc_feature (1)..(1000): Ceres Seq. ID no. 13611217
  misc_feature (1)..(1000): Ortholog of  Ceres SEQ ID NO 13583434 as cited in SEQ ID NO 62329

SEQ ID NO: 114014 - protein, 228 aa, Arabidopsis thaliana; identical to SEQ ID NO: 20891
  peptide (1)..(228): Ceres Seq. ID no. 13611218

SEQ ID NO: 114015 - protein, 154 aa, Arabidopsis thaliana; identical to SEQ ID NO: 20892
  peptide (1)..(154): Ceres Seq. ID no. 13611219

SEQ ID NO: 114016 - DNA, 1346 bp, Arabidopsis thaliana; identical to SEQ ID NO: 102777
  misc_feature (1)..(1346): Ceres Seq. ID no. 13611228
  misc_feature (1)..(1346): Ortholog of  Ceres SEQ ID NO 13582388 as cited in SEQ ID NO 56812
  misc_feature (1)..(1346): Ortholog of  Ceres SEQ ID NO 14305353 as cited in SEQ ID NO 57710

SEQ ID NO: 114017 - protein, 279 aa, Arabidopsis thaliana; identical to SEQ ID NO: 25551
  peptide (1)..(279): Ceres Seq. ID no. 13611229

SEQ ID NO: 114018 - protein, 251 aa, Arabidopsis thaliana; identical to SEQ ID NO: 25552
  peptide (1)..(251): Ceres Seq. ID no. 13611230

SEQ ID NO: 114019 - DNA, 1127 bp, Arabidopsis thaliana; identical to SEQ ID NO: 102780
  misc_feature (1)..(1127): Ceres Seq. ID no. 13611238
  misc_feature (1)..(1127): Ortholog of  Ceres SEQ ID NO 13594377 as cited in SEQ ID NO 58177
  misc_feature (1)..(1127): Ortholog of  Ceres SEQ ID NO 15224613 as cited in SEQ ID NO 58938
  misc_feature (1)..(1127): Ortholog of  Ceres SEQ ID NO 13664309 as cited in SEQ ID NO 60596

SEQ ID NO: 114020 - protein, 329 aa, Arabidopsis thaliana; identical to SEQ ID NO: 102781
  peptide (1)..(329): Ceres Seq. ID no. 13611239

SEQ ID NO: 114021 - protein, 315 aa, Arabidopsis thaliana; identical to SEQ ID NO: 102782
  peptide (1)..(315): Ceres Seq. ID no. 13611240

SEQ ID NO: 114022 - protein, 302 aa, Arabidopsis thaliana; identical to SEQ ID NO: 102783
  peptide (1)..(302): Ceres Seq. ID no. 13611241

SEQ ID NO: 114023 - DNA, 1250 bp, Arabidopsis thaliana; identical to SEQ ID NO: 102784
  misc_feature (1)..(1250): Ceres Seq. ID no. 13611266
  misc_feature (1)..(1250): Ortholog of  Ceres SEQ ID NO 15177718 as cited in SEQ ID NO 0

SEQ ID NO: 114024 - protein, 324 aa, Arabidopsis thaliana; identical to SEQ ID NO: 102785
  peptide (1)..(324): Ceres Seq. ID no. 13611267

SEQ ID NO: 114025 - protein, 308 aa, Arabidopsis thaliana; identical to SEQ ID NO: 102786
  peptide (1)..(308): Ceres Seq. ID no. 13611268

SEQ ID NO: 114026 - protein, 272 aa, Arabidopsis thaliana; identical to SEQ ID NO: 102787
  peptide (1)..(272): Ceres Seq. ID no. 13611269

SEQ ID NO: 114027 - DNA, 635 bp, Arabidopsis thaliana; identical to SEQ ID NO: 102788
  misc_feature (1)..(635): Ceres Seq. ID no. 13611278
  misc_feature (1)..(635): Ortholog of  Ceres SEQ ID NO 12610597 as cited in SEQ ID NO 56210
  misc_feature (1)..(635): Ortholog of  Ceres SEQ ID NO 12597985 as cited in SEQ ID NO 61061

SEQ ID NO: 114028 - protein, 173 aa, Arabidopsis thaliana; identical to SEQ ID NO: 102789
  peptide (1)..(173): Ceres Seq. ID no. 13611279

SEQ ID NO: 114029 - protein, 162 aa, Arabidopsis thaliana; identical to SEQ ID NO: 21636
  peptide (1)..(162): Ceres Seq. ID no. 13611280

SEQ ID NO: 114030 - protein, 132 aa, Arabidopsis thaliana; identical to SEQ ID NO: 21637
  peptide (1)..(132): Ceres Seq. ID no. 13611281

SEQ ID NO: 114031 - DNA, 1336 bp, Arabidopsis thaliana; identical to SEQ ID NO: 102792
  misc_feature (1)..(1336): Ceres Seq. ID no. 13611286
  misc_feature (1)..(1336): Ortholog of  Ceres SEQ ID NO 13597888 as cited in SEQ ID NO 64299

SEQ ID NO: 114032 - protein, 348 aa, Arabidopsis thaliana; identical to SEQ ID NO: 21918
  peptide (1)..(348): Ceres Seq. ID no. 13611287

SEQ ID NO: 114033 - protein, 308 aa, Arabidopsis thaliana; identical to SEQ ID NO: 21919
  peptide (1)..(308): Ceres Seq. ID no. 13611288

SEQ ID NO: 114034 - protein, 266 aa, Arabidopsis thaliana; identical to SEQ ID NO: 21920
  peptide (1)..(266): Ceres Seq. ID no. 13611289

SEQ ID NO: 114035 - DNA, 736 bp, Arabidopsis thaliana; identical to SEQ ID NO: 102796
  misc_feature (1)..(736): Ceres Seq. ID no. 13611297
  misc_feature (1)..(736): Ortholog of  Ceres SEQ ID NO 13599287 as cited in SEQ ID NO 338

SEQ ID NO: 114036 - protein, 188 aa, Arabidopsis thaliana; identical to SEQ ID NO: 102797
  peptide (1)..(188): Ceres Seq. ID no. 13611298

SEQ ID NO: 114037 - protein, 173 aa, Arabidopsis thaliana; identical to SEQ ID NO: 29112
  peptide (1)..(173): Ceres Seq. ID no. 13611299

SEQ ID NO: 114038 - protein, 118 aa, Arabidopsis thaliana; identical to SEQ ID NO: 29113
  peptide (1)..(118): Ceres Seq. ID no. 13611300

SEQ ID NO: 114039 - DNA, 970 bp, Arabidopsis thaliana; identical to SEQ ID NO: 102800
  misc_feature (1)..(970): Ceres Seq. ID no. 13611305
  misc_feature (1)..(970): Ortholog of  Ceres SEQ ID NO 15171175 as cited in SEQ ID NO 57476
  misc_feature (1)..(970): Ortholog of  Ceres SEQ ID NO 15178436 as cited in SEQ ID NO 57919
  misc_feature (1)..(970): Ortholog of  Ceres SEQ ID NO 13655808 as cited in SEQ ID NO 64901

SEQ ID NO: 114040 - protein, 221 aa, Arabidopsis thaliana; identical to SEQ ID NO: 102801
  peptide (1)..(221): Ceres Seq. ID no. 13611306

SEQ ID NO: 114041 - DNA, 1578 bp, Arabidopsis thaliana; identical to SEQ ID NO: 102802
  misc_feature (1)..(1578): Ceres Seq. ID no. 13611316
  misc_feature (1)..(1578): Ortholog of  Ceres SEQ ID NO 15176057 as cited in SEQ ID NO 56363
  misc_feature (1)..(1578): Ortholog of  Ceres SEQ ID NO 14316269 as cited in SEQ ID NO 60082

SEQ ID NO: 114042 - protein, 384 aa, Arabidopsis thaliana; identical to SEQ ID NO: 102803
  peptide (1)..(384): Ceres Seq. ID no. 13611317

SEQ ID NO: 114043 - protein, 382 aa, Arabidopsis thaliana; identical to SEQ ID NO: 102804
  peptide (1)..(382): Ceres Seq. ID no. 13611318

SEQ ID NO: 114044 - protein, 288 aa, Arabidopsis thaliana; identical to SEQ ID NO: 102805
  peptide (1)..(288): Ceres Seq. ID no. 13611319

SEQ ID NO: 114045 - DNA, 1266 bp, Arabidopsis thaliana; identical to SEQ ID NO: 102806
  misc_feature (1)..(1266): Ceres Seq. ID no. 13611324
  misc_feature (1)..(1266): Ortholog of  Ceres SEQ ID NO 15171257 as cited in SEQ ID NO 52268

SEQ ID NO: 114046 - protein, 373 aa, Arabidopsis thaliana; identical to SEQ ID NO: 102807
  peptide (1)..(373): Ceres Seq. ID no. 13611325

SEQ ID NO: 114047 - protein, 345 aa, Arabidopsis thaliana; identical to SEQ ID NO: 24271
  peptide (1)..(345): Ceres Seq. ID no. 13611326

SEQ ID NO: 114048 - protein, 243 aa, Arabidopsis thaliana; identical to SEQ ID NO: 24272
  peptide (1)..(243): Ceres Seq. ID no. 13611327

SEQ ID NO: 114049 - DNA, 1266 bp, Arabidopsis thaliana; identical to SEQ ID NO: 102810
  misc_feature (1)..(1266): Ceres Seq. ID no. 13611328
  misc_feature (1)..(1266): Ortholog of  Ceres SEQ ID NO 15170595 as cited in SEQ ID NO 57510
  misc_feature (1)..(1266): Ortholog of  Ceres SEQ ID NO 13655218 as cited in SEQ ID NO 68872

SEQ ID NO: 114050 - protein, 364 aa, Arabidopsis thaliana; identical to SEQ ID NO: 27840
  peptide (1)..(364): Ceres Seq. ID no. 13611329

SEQ ID NO: 114051 - protein, 333 aa, Arabidopsis thaliana; identical to SEQ ID NO: 27841
  peptide (1)..(333): Ceres Seq. ID no. 13611330

SEQ ID NO: 114052 - protein, 325 aa, Arabidopsis thaliana; identical to SEQ ID NO: 27842
  peptide (1)..(325): Ceres Seq. ID no. 13611331

SEQ ID NO: 114053 - DNA, 1645 bp, Arabidopsis thaliana; identical to SEQ ID NO: 102814
  misc_feature (1)..(1645): Ceres Seq. ID no. 13611332
  misc_feature (1)..(1645): Ortholog of  Ceres SEQ ID NO 13593889 as cited in SEQ ID NO 53305
  misc_feature (1)..(1645): Ortholog of  Ceres SEQ ID NO 13581959 as cited in SEQ ID NO 56156

SEQ ID NO: 114054 - protein, 391 aa, Arabidopsis thaliana; identical to SEQ ID NO: 36667
  peptide (1)..(391): Ceres Seq. ID no. 13611333

SEQ ID NO: 114055 - protein, 341 aa, Arabidopsis thaliana; identical to SEQ ID NO: 36668
  peptide (1)..(341): Ceres Seq. ID no. 13611334

SEQ ID NO: 114056 - protein, 319 aa, Arabidopsis thaliana; identical to SEQ ID NO: 36669
  peptide (1)..(319): Ceres Seq. ID no. 13611335

SEQ ID NO: 114057 - DNA, 1169 bp, Arabidopsis thaliana; identical to SEQ ID NO: 102818
  misc_feature (1)..(1169): Ceres Seq. ID no. 13611336
  misc_feature (1)..(1169): Ortholog of  Ceres SEQ ID NO 13599496 as cited in SEQ ID NO 0

SEQ ID NO: 114058 - protein, 338 aa, Arabidopsis thaliana; identical to SEQ ID NO: 102819
  peptide (1)..(338): Ceres Seq. ID no. 13611337

SEQ ID NO: 114059 - protein, 334 aa, Arabidopsis thaliana; identical to SEQ ID NO: 102820
  peptide (1)..(334): Ceres Seq. ID no. 13611338

SEQ ID NO: 114060 - protein, 242 aa, Arabidopsis thaliana; identical to SEQ ID NO: 102821
  peptide (1)..(242): Ceres Seq. ID no. 13611339

SEQ ID NO: 114061 - DNA, 1680 bp, Arabidopsis thaliana; identical to SEQ ID NO: 102822
  misc_feature (1)..(1680): Ceres Seq. ID no. 13611343
  misc_feature (1)..(1680): Ortholog of  Ceres SEQ ID NO 13600310 as cited in SEQ ID NO 5086

SEQ ID NO: 114062 - protein, 469 aa, Arabidopsis thaliana; identical to SEQ ID NO: 102823
  peptide (1)..(469): Ceres Seq. ID no. 13611344

SEQ ID NO: 114063 - protein, 452 aa, Arabidopsis thaliana; identical to SEQ ID NO: 102824
  peptide (1)..(452): Ceres Seq. ID no. 13611345

SEQ ID NO: 114064 - protein, 398 aa, Arabidopsis thaliana; identical to SEQ ID NO: 102825
  peptide (1)..(398): Ceres Seq. ID no. 13611346

SEQ ID NO: 114065 - DNA, 1697 bp, Arabidopsis thaliana; identical to SEQ ID NO: 102826
  misc_feature (1)..(1697): Ceres Seq. ID no. 13611351
  misc_feature (1)..(1697): Ortholog of  Ceres SEQ ID NO 14304276 as cited in SEQ ID NO 53407

SEQ ID NO: 114066 - protein, 430 aa, Arabidopsis thaliana; identical to SEQ ID NO: 31004
  peptide (1)..(430): Ceres Seq. ID no. 13611352

SEQ ID NO: 114067 - protein, 394 aa, Arabidopsis thaliana; identical to SEQ ID NO: 31005
  peptide (1)..(394): Ceres Seq. ID no. 13611353

SEQ ID NO: 114068 - protein, 276 aa, Arabidopsis thaliana; identical to SEQ ID NO: 31006
  peptide (1)..(276): Ceres Seq. ID no. 13611354

SEQ ID NO: 114069 - DNA, 719 bp, Arabidopsis thaliana; identical to SEQ ID NO: 102830
  misc_feature (1)..(719): Ceres Seq. ID no. 13611355
  misc_feature (1)..(719): Ortholog of  Ceres SEQ ID NO 13580204 as cited in SEQ ID NO 0

SEQ ID NO: 114070 - protein, 151 aa, Arabidopsis thaliana [sequence omitted]

SEQ ID NO: 114071 - protein, 148 aa, Arabidopsis thaliana; identical to SEQ ID NO: 26854
  peptide (1)..(148): Ceres Seq. ID no. 13611357

SEQ ID NO: 114072 - DNA, 1480 bp, Arabidopsis thaliana; identical to SEQ ID NO: 102833
  misc_feature (1)..(1480): Ceres Seq. ID no. 13611362
  misc_feature (1)..(1480): Ortholog of  Ceres SEQ ID NO 14303105 as cited in SEQ ID NO 66589

SEQ ID NO: 114073 - protein, 492 aa, Arabidopsis thaliana; identical to SEQ ID NO: 102834
  peptide (1)..(492): Ceres Seq. ID no. 13611363

SEQ ID NO: 114074 - protein, 478 aa, Arabidopsis thaliana; identical to SEQ ID NO: 102835
  peptide (1)..(478): Ceres Seq. ID no. 13611364

SEQ ID NO: 114075 - protein, 375 aa, Arabidopsis thaliana; identical to SEQ ID NO: 102836
  peptide (1)..(375): Ceres Seq. ID no. 13611365

SEQ ID NO: 114076 - DNA, 2199 bp, Arabidopsis thaliana; identical to SEQ ID NO: 102837
  misc_feature (1)..(2199): Ceres Seq. ID no. 13611377
  misc_feature (1)..(2199): Ortholog of  Ceres SEQ ID NO 13654290 as cited in SEQ ID NO 62197
  misc_feature (1)..(2199): Ortholog of  Ceres SEQ ID NO 14301924 as cited in SEQ ID NO 67731

SEQ ID NO: 114077 - protein, 632 aa, Arabidopsis thaliana; identical to SEQ ID NO: 102838
  peptide (1)..(632): Ceres Seq. ID no. 13611378

SEQ ID NO: 114078 - protein, 607 aa, Arabidopsis thaliana; identical to SEQ ID NO: 102839
  peptide (1)..(607): Ceres Seq. ID no. 13611379

SEQ ID NO: 114079 - protein, 606 aa, Arabidopsis thaliana; identical to SEQ ID NO: 102840
  peptide (1)..(606): Ceres Seq. ID no. 13611380

SEQ ID NO: 114080 - DNA, 1042 bp, Arabidopsis thaliana; identical to SEQ ID NO: 102841
  misc_feature (1)..(1042): Ceres Seq. ID no. 13611381
  misc_feature (1)..(1042): Ortholog of  Ceres SEQ ID NO 14311477 as cited in SEQ ID NO 51390
  misc_feature (1)..(1042): Ortholog of  Ceres SEQ ID NO 14302840 as cited in SEQ ID NO 62295
  misc_feature (1)..(1042): Ortholog of  Ceres SEQ ID NO 13596892 as cited in SEQ ID NO 62900

SEQ ID NO: 114081 - protein, 308 aa, Arabidopsis thaliana; identical to SEQ ID NO: 102842
  peptide (1)..(308): Ceres Seq. ID no. 13611382

SEQ ID NO: 114082 - protein, 306 aa, Arabidopsis thaliana; identical to SEQ ID NO: 102843
  peptide (1)..(306): Ceres Seq. ID no. 13611383

SEQ ID NO: 114083 - protein, 276 aa, Arabidopsis thaliana; identical to SEQ ID NO: 102844
  peptide (1)..(276): Ceres Seq. ID no. 13611384

SEQ ID NO: 114084 - DNA, 874 bp, Arabidopsis thaliana; identical to SEQ ID NO: 102845
  misc_feature (1)..(874): Ceres Seq. ID no. 13611385
  misc_feature (1)..(874): Ortholog of  Ceres SEQ ID NO 14306246 as cited in SEQ ID NO 0

SEQ ID NO: 114085 - protein, 260 aa, Arabidopsis thaliana; identical to SEQ ID NO: 21051
  peptide (1)..(260): Ceres Seq. ID no. 13611386

SEQ ID NO: 114086 - protein, 227 aa, Arabidopsis thaliana; identical to SEQ ID NO: 21052
  peptide (1)..(227): Ceres Seq. ID no. 13611387

SEQ ID NO: 114087 - protein, 145 aa, Arabidopsis thaliana; identical to SEQ ID NO: 21053
  peptide (1)..(145): Ceres Seq. ID no. 13611388

SEQ ID NO: 114088 - DNA, 2879 bp, Arabidopsis thaliana; identical to SEQ ID NO: 102849
  misc_feature (1)..(2879): Ceres Seq. ID no. 13611392
  misc_feature (1)..(2879): Ortholog of  Ceres SEQ ID NO 13623325 as cited in SEQ ID NO 357
  misc_feature (1)..(2879): Ortholog of  Ceres SEQ ID NO 13635680 as cited in SEQ ID NO 578
  misc_feature (1)..(2879): Ortholog of  Ceres SEQ ID NO 13624195 as cited in SEQ ID NO 1018

SEQ ID NO: 114089 - protein, 735 aa, Arabidopsis thaliana; identical to SEQ ID NO: 102850
  peptide (1)..(735): Ceres Seq. ID no. 15220751

SEQ ID NO: 114090 - protein, 603 aa, Arabidopsis thaliana; identical to SEQ ID NO: 102851
  peptide (1)..(603): Ceres Seq. ID no. 15220752

SEQ ID NO: 114091 - protein, 592 aa, Arabidopsis thaliana; identical to SEQ ID NO: 102852
  peptide (1)..(592): Ceres Seq. ID no. 15220753

SEQ ID NO: 114092 - DNA, 1472 bp, Arabidopsis thaliana; identical to SEQ ID NO: 102853
  misc_feature (1)..(1472): Ceres Seq. ID no. 13611393
  misc_feature (1)..(1472): Ortholog of  Ceres SEQ ID NO 12784228 as cited in SEQ ID NO 66111

SEQ ID NO: 114093 - protein, 353 aa, Arabidopsis thaliana; identical to SEQ ID NO: 102854
  peptide (1)..(353): Ceres Seq. ID no. 13611394

SEQ ID NO: 114094 - protein, 309 aa, Arabidopsis thaliana; identical to SEQ ID NO: 102855
  peptide (1)..(309): Ceres Seq. ID no. 13611395

SEQ ID NO: 114095 - protein, 237 aa, Arabidopsis thaliana; identical to SEQ ID NO: 24976
  peptide (1)..(237): Ceres Seq. ID no. 13611396

SEQ ID NO: 114096 - DNA, 1178 bp, Arabidopsis thaliana; identical to SEQ ID NO: 102857
  misc_feature (1)..(1178): Ceres Seq. ID no. 13611397
  misc_feature (1)..(1178): Ortholog of  Ceres SEQ ID NO 12611159 as cited in SEQ ID NO 59821
  misc_feature (1)..(1178): Ortholog of  Ceres SEQ ID NO 13584238 as cited in SEQ ID NO 64216

SEQ ID NO: 114097 - protein, 274 aa, Arabidopsis thaliana; identical to SEQ ID NO: 102858
  peptide (1)..(274): Ceres Seq. ID no. 13611398

SEQ ID NO: 114098 - DNA, 1587 bp, Arabidopsis thaliana; identical to SEQ ID NO: 102859
  misc_feature (1)..(1587): Ceres Seq. ID no. 13611399
  misc_feature (1)..(1587): Ortholog of  Ceres SEQ ID NO 14315919 as cited in SEQ ID NO 60074

SEQ ID NO: 114099 - protein, 414 aa, Arabidopsis thaliana; identical to SEQ ID NO: 27767
  peptide (1)..(414): Ceres Seq. ID no. 13611400

SEQ ID NO: 114100 - protein, 284 aa, Arabidopsis thaliana; identical to SEQ ID NO: 27768
  peptide (1)..(284): Ceres Seq. ID no. 13611401

SEQ ID NO: 114101 - protein, 256 aa, Arabidopsis thaliana; identical to SEQ ID NO: 27769
  peptide (1)..(256): Ceres Seq. ID no. 13611402

SEQ ID NO: 114102 - DNA, 894 bp, Arabidopsis thaliana; identical to SEQ ID NO: 102863
  misc_feature (1)..(894): Ceres Seq. ID no. 13611406
  misc_feature (1)..(894): Ortholog of  Ceres SEQ ID NO 12558659 as cited in SEQ ID NO 20727
  misc_feature (1)..(894): Ortholog of  Ceres SEQ ID NO 14308640 as cited in SEQ ID NO 60489
  misc_feature (1)..(894): Ortholog of  Ceres SEQ ID NO 12619999 as cited in SEQ ID NO 66123
  misc_feature (1)..(894): Ortholog of  Ceres SEQ ID NO 13656436 as cited in SEQ ID NO 69154

SEQ ID NO: 114103 - protein, 216 aa, Arabidopsis thaliana; identical to SEQ ID NO: 26500
  peptide (1)..(216): Ceres Seq. ID no. 13611407

SEQ ID NO: 114104 - DNA, 950 bp, Arabidopsis thaliana; identical to SEQ ID NO: 102865
  misc_feature (1)..(950): Ceres Seq. ID no. 13611423
  misc_feature (1)..(950): Ortholog of  Ceres SEQ ID NO 15170395 as cited in SEQ ID NO 58055

SEQ ID NO: 114105 - protein, 185 aa, Arabidopsis thaliana; identical to SEQ ID NO: 23876
  peptide (1)..(185): Ceres Seq. ID no. 13611424

SEQ ID NO: 114106 - protein, 116 aa, Arabidopsis thaliana; identical to SEQ ID NO: 23877
  peptide (1)..(116): Ceres Seq. ID no. 13611425

SEQ ID NO: 114107 - DNA, 738 bp, Arabidopsis thaliana; identical to SEQ ID NO: 102868
  misc_feature (1)..(738): Ceres Seq. ID no. 13611426
  misc_feature (1)..(738): Ortholog of  Ceres SEQ ID NO 15225657 as cited in SEQ ID NO 329

SEQ ID NO: 114108 - protein, 122 aa, Arabidopsis thaliana [sequence omitted]

SEQ ID NO: 114109 - protein, 89 aa, Arabidopsis thaliana; identical to SEQ ID NO: 36259
  peptide (1)..(89): Ceres Seq. ID no. 13611428

SEQ ID NO: 114110 - protein, 69 aa, Arabidopsis thaliana; identical to SEQ ID NO: 102871
  peptide (1)..(69): Ceres Seq. ID no. 13611429

SEQ ID NO: 114111 - DNA, 1394 bp, Arabidopsis thaliana; identical to SEQ ID NO: 102872
  misc_feature (1)..(1394): Ceres Seq. ID no. 13611450
  misc_feature (1)..(1394): Ortholog of  Ceres SEQ ID NO 13648488 as cited in SEQ ID NO 20419

SEQ ID NO: 114112 - protein, 289 aa, Arabidopsis thaliana; identical to SEQ ID NO: 21458
  peptide (1)..(289): Ceres Seq. ID no. 13611451

SEQ ID NO: 114113 - protein, 179 aa, Arabidopsis thaliana; identical to SEQ ID NO: 21459
  peptide (1)..(179): Ceres Seq. ID no. 13611452

SEQ ID NO: 114114 - DNA, 619 bp, Arabidopsis thaliana; identical to SEQ ID NO: 102875
  misc_feature (1)..(619): Ceres Seq. ID no. 13611457
  misc_feature (1)..(619): Ortholog of  Ceres SEQ ID NO 15225657 as cited in SEQ ID NO 329

SEQ ID NO: 114115 - protein, 153 aa, Arabidopsis thaliana; identical to SEQ ID NO: 102876
  peptide (1)..(153): Ceres Seq. ID no. 13611458

SEQ ID NO: 114116 - protein, 134 aa, Arabidopsis thaliana; identical to SEQ ID NO: 102877
  peptide (1)..(134): Ceres Seq. ID no. 13611459

SEQ ID NO: 114117 - protein, 131 aa, Arabidopsis thaliana; identical to SEQ ID NO: 102878
  peptide (1)..(131): Ceres Seq. ID no. 13611460

SEQ ID NO: 114118 - DNA, 1180 bp, Arabidopsis thaliana; identical to SEQ ID NO: 102879
  misc_feature (1)..(1180): Ceres Seq. ID no. 13611461
  misc_feature (1)..(1180): Ortholog of  Ceres SEQ ID NO 13594503 as cited in SEQ ID NO 51336
  misc_feature (1)..(1180): Ortholog of  Ceres SEQ ID NO 15171370 as cited in SEQ ID NO 51492

SEQ ID NO: 114119 - protein, 119 aa, Arabidopsis thaliana; identical to SEQ ID NO: 102880
  peptide (1)..(119): Ceres Seq. ID no. 13611462

SEQ ID NO: 114120 - protein, 91 aa, Arabidopsis thaliana; identical to SEQ ID NO: 102881
  peptide (1)..(91): Ceres Seq. ID no. 13611463

SEQ ID NO: 114121 - protein, 80 aa, Arabidopsis thaliana; identical to SEQ ID NO: 102882
  peptide (1)..(80): Ceres Seq. ID no. 13611464

SEQ ID NO: 114122 - DNA, 1095 bp, Arabidopsis thaliana; identical to SEQ ID NO: 102883
  misc_feature (1)..(1095): Ceres Seq. ID no. 13611475
  misc_feature (1)..(1095): Ortholog of  Ceres SEQ ID NO 14311509 as cited in SEQ ID NO 51398
  misc_feature (1)..(1095): Ortholog of  Ceres SEQ ID NO 14307702 as cited in SEQ ID NO 54703
  misc_feature (1)..(1095): Ortholog of  Ceres SEQ ID NO 15176361 as cited in SEQ ID NO 55438

SEQ ID NO: 114123 - protein, 314 aa, Arabidopsis thaliana; identical to SEQ ID NO: 102884
  peptide (1)..(314): Ceres Seq. ID no. 13611476

SEQ ID NO: 114124 - protein, 223 aa, Arabidopsis thaliana; identical to SEQ ID NO: 35867
  peptide (1)..(223): Ceres Seq. ID no. 13611477

SEQ ID NO: 114125 - DNA, 959 bp, Arabidopsis thaliana; identical to SEQ ID NO: 102886
  misc_feature (1)..(959): Ceres Seq. ID no. 13611480
  misc_feature (1)..(959): Ortholog of  Ceres SEQ ID NO 13596601 as cited in SEQ ID NO 62486

SEQ ID NO: 114126 - protein, 293 aa, Arabidopsis thaliana; identical to SEQ ID NO: 102887
  peptide (1)..(293): Ceres Seq. ID no. 13611481

SEQ ID NO: 114127 - protein, 270 aa, Arabidopsis thaliana; identical to SEQ ID NO: 102888
  peptide (1)..(270): Ceres Seq. ID no. 13611482

SEQ ID NO: 114128 - protein, 227 aa, Arabidopsis thaliana; identical to SEQ ID NO: 102889
  peptide (1)..(227): Ceres Seq. ID no. 13611483

SEQ ID NO: 114129 - DNA, 1330 bp, Arabidopsis thaliana; identical to SEQ ID NO: 102890
  misc_feature (1)..(1330): Ceres Seq. ID no. 13611484
  misc_feature (1)..(1330): Ortholog of  Ceres SEQ ID NO 15171556 as cited in SEQ ID NO 59687
  misc_feature (1)..(1330): Ortholog of  Ceres SEQ ID NO 15177935 as cited in SEQ ID NO 60258
  misc_feature (1)..(1330): Ortholog of  Ceres SEQ ID NO 13659033 as cited in SEQ ID NO 66372
  misc_feature (1)..(1330): Ortholog of  Ceres SEQ ID NO 12625899 as cited in SEQ ID NO 69079
  misc_feature (1)..(1330): Ortholog of  Ceres SEQ ID NO 15180051 as cited in SEQ ID NO 0

SEQ ID NO: 114130 - protein, 380 aa, Arabidopsis thaliana; identical to SEQ ID NO: 21494
  peptide (1)..(380): Ceres Seq. ID no. 13611485

SEQ ID NO: 114131 - protein, 250 aa, Arabidopsis thaliana; identical to SEQ ID NO: 21495
  peptide (1)..(250): Ceres Seq. ID no. 13611486

SEQ ID NO: 114132 - protein, 240 aa, Arabidopsis thaliana; identical to SEQ ID NO: 21496
  peptide (1)..(240): Ceres Seq. ID no. 13611487

SEQ ID NO: 114133 - DNA, 1309 bp, Arabidopsis thaliana; identical to SEQ ID NO: 102894
  misc_feature (1)..(1309): Ceres Seq. ID no. 13611499
  misc_feature (1)..(1309): Ortholog of  Ceres SEQ ID NO 14308103 as cited in SEQ ID NO 59002

SEQ ID NO: 114134 - protein, 351 aa, Arabidopsis thaliana; identical to SEQ ID NO: 102895
  peptide (1)..(351): Ceres Seq. ID no. 13611500

SEQ ID NO: 114135 - protein, 329 aa, Arabidopsis thaliana; identical to SEQ ID NO: 102896
  peptide (1)..(329): Ceres Seq. ID no. 13611501

SEQ ID NO: 114136 - protein, 295 aa, Arabidopsis thaliana; identical to SEQ ID NO: 34885
  peptide (1)..(295): Ceres Seq. ID no. 13611502

SEQ ID NO: 114137 - DNA, 1514 bp, Arabidopsis thaliana; identical to SEQ ID NO: 102898
  misc_feature (1)..(1514): Ceres Seq. ID no. 13611503
  misc_feature (1)..(1514): Ortholog of  Ceres SEQ ID NO 14314276 as cited in SEQ ID NO 57382

SEQ ID NO: 114138 - protein, 440 aa, Arabidopsis thaliana; identical to SEQ ID NO: 102899
  peptide (1)..(440): Ceres Seq. ID no. 13611504

SEQ ID NO: 114139 - protein, 434 aa, Arabidopsis thaliana; identical to SEQ ID NO: 102900
  peptide (1)..(434): Ceres Seq. ID no. 13611505

SEQ ID NO: 114140 - protein, 403 aa, Arabidopsis thaliana; identical to SEQ ID NO: 102901
  peptide (1)..(403): Ceres Seq. ID no. 13611506

SEQ ID NO: 114141 - DNA, 1483 bp, Arabidopsis thaliana; identical to SEQ ID NO: 102902
  misc_feature (1)..(1483): Ceres Seq. ID no. 13611519
  misc_feature (1)..(1483): Ortholog of  Ceres SEQ ID NO 13659033 as cited in SEQ ID NO 66372
  misc_feature (1)..(1483): Ortholog of  Ceres SEQ ID NO 13655724 as cited in SEQ ID NO 68973
  misc_feature (1)..(1483): Ortholog of  Ceres SEQ ID NO 12625899 as cited in SEQ ID NO 69079

SEQ ID NO: 114142 - protein, 448 aa, Arabidopsis thaliana; identical to SEQ ID NO: 102903
  peptide (1)..(448): Ceres Seq. ID no. 13611520

SEQ ID NO: 114143 - protein, 442 aa, Arabidopsis thaliana; identical to SEQ ID NO: 102904
  peptide (1)..(442): Ceres Seq. ID no. 13611521

SEQ ID NO: 114144 - DNA, 760 bp, Arabidopsis thaliana; identical to SEQ ID NO: 102905
  misc_feature (1)..(760): Ceres Seq. ID no. 13611522
  misc_feature (1)..(760): Ortholog of  Ceres SEQ ID NO 12556910 as cited in SEQ ID NO 39
  misc_feature (1)..(760): Ortholog of  Ceres SEQ ID NO 13594970 as cited in SEQ ID NO 56328
  misc_feature (1)..(760): Ortholog of  Ceres SEQ ID NO 12585079 as cited in SEQ ID NO 63137

SEQ ID NO: 114145 - protein, 164 aa, Arabidopsis thaliana; identical to SEQ ID NO: 43971
  peptide (1)..(164): Ceres Seq. ID no. 13611523

SEQ ID NO: 114146 - protein, 154 aa, Arabidopsis thaliana; identical to SEQ ID NO: 43972
  peptide (1)..(154): Ceres Seq. ID no. 13611524

SEQ ID NO: 114147 - protein, 151 aa, Arabidopsis thaliana; identical to SEQ ID NO: 43973
  peptide (1)..(151): Ceres Seq. ID no. 13611525

SEQ ID NO: 114148 - DNA, 1008 bp, Arabidopsis thaliana; identical to SEQ ID NO: 102909
  misc_feature (1)..(1008): Ceres Seq. ID no. 13611534
  misc_feature (1)..(1008): Ortholog of  Ceres SEQ ID NO 14315553 as cited in SEQ ID NO 60445
  misc_feature (1)..(1008): Ortholog of  Ceres SEQ ID NO 13598045 as cited in SEQ ID NO 66822

SEQ ID NO: 114149 - protein, 246 aa, Arabidopsis thaliana; identical to SEQ ID NO: 102910
  peptide (1)..(246): Ceres Seq. ID no. 13611535

SEQ ID NO: 114150 - protein, 138 aa, Arabidopsis thaliana; identical to SEQ ID NO: 28382
  peptide (1)..(138): Ceres Seq. ID no. 13611536

SEQ ID NO: 114151 - DNA, 1500 bp, Arabidopsis thaliana; identical to SEQ ID NO: 102912
  misc_feature (1)..(1500): Ceres Seq. ID no. 13611537
  misc_feature (1)..(1500): Ortholog of  Ceres SEQ ID NO 14304925 as cited in SEQ ID NO 52996

SEQ ID NO: 114152 - protein, 442 aa, Arabidopsis thaliana; identical to SEQ ID NO: 102913
  peptide (1)..(442): Ceres Seq. ID no. 13611538

SEQ ID NO: 114153 - protein, 374 aa, Arabidopsis thaliana; identical to SEQ ID NO: 102914
  peptide (1)..(374): Ceres Seq. ID no. 13611539

SEQ ID NO: 114154 - protein, 364 aa, Arabidopsis thaliana; identical to SEQ ID NO: 102915
  peptide (1)..(364): Ceres Seq. ID no. 13611540

SEQ ID NO: 114155 - DNA, 1427 bp, Arabidopsis thaliana; identical to SEQ ID NO: 102916
  misc_feature (1)..(1427): Ceres Seq. ID no. 13611541
  misc_feature (1)..(1427): Ortholog of  Ceres SEQ ID NO 14316017 as cited in SEQ ID NO 67028
  misc_feature (1)..(1427): Ortholog of  Ceres SEQ ID NO 15177500 as cited in SEQ ID NO 0

SEQ ID NO: 114156 - protein, 425 aa, Arabidopsis thaliana; identical to SEQ ID NO: 22043
  peptide (1)..(425): Ceres Seq. ID no. 13611542

SEQ ID NO: 114157 - protein, 404 aa, Arabidopsis thaliana; identical to SEQ ID NO: 22044
  peptide (1)..(404): Ceres Seq. ID no. 13611543

SEQ ID NO: 114158 - protein, 315 aa, Arabidopsis thaliana; identical to SEQ ID NO: 22045
  peptide (1)..(315): Ceres Seq. ID no. 13611544

SEQ ID NO: 114159 - DNA, 1438 bp, Arabidopsis thaliana; identical to SEQ ID NO: 102920
  misc_feature (1)..(1438): Ceres Seq. ID no. 13611545
  misc_feature (1)..(1438): Ortholog of  Ceres SEQ ID NO 13639645 as cited in SEQ ID NO 57488

SEQ ID NO: 114160 - protein, 377 aa, Arabidopsis thaliana; identical to SEQ ID NO: 102921
  peptide (1)..(377): Ceres Seq. ID no. 13611546

SEQ ID NO: 114161 - protein, 373 aa, Arabidopsis thaliana; identical to SEQ ID NO: 102922
  peptide (1)..(373): Ceres Seq. ID no. 13611547

SEQ ID NO: 114162 - protein, 363 aa, Arabidopsis thaliana; identical to SEQ ID NO: 102923
  peptide (1)..(363): Ceres Seq. ID no. 13611548

SEQ ID NO: 114163 - DNA, 2316 bp, Arabidopsis thaliana; identical to SEQ ID NO: 102924
  misc_feature (1)..(2316): Ceres Seq. ID no. 13611551
  misc_feature (1)..(2316): Ortholog of  Ceres SEQ ID NO 15225222 as cited in SEQ ID NO 53759

SEQ ID NO: 114164 - protein, 739 aa, Arabidopsis thaliana; identical to SEQ ID NO: 102925
  peptide (1)..(739): Ceres Seq. ID no. 13611552

SEQ ID NO: 114165 - protein, 711 aa, Arabidopsis thaliana; identical to SEQ ID NO: 102926
  peptide (1)..(711): Ceres Seq. ID no. 13611553

SEQ ID NO: 114166 - protein, 666 aa, Arabidopsis thaliana; identical to SEQ ID NO: 102927
  peptide (1)..(666): Ceres Seq. ID no. 13611554

SEQ ID NO: 114167 - DNA, 1196 bp, Arabidopsis thaliana; identical to SEQ ID NO: 102928
  misc_feature (1)..(1196): Ceres Seq. ID no. 13611555
  misc_feature (1)..(1196): Ortholog of  Ceres SEQ ID NO 12615264 as cited in SEQ ID NO 62383

SEQ ID NO: 114168 - protein, 298 aa, Arabidopsis thaliana; identical to SEQ ID NO: 102929
  peptide (1)..(298): Ceres Seq. ID no. 13611556

SEQ ID NO: 114169 - protein, 157 aa, Arabidopsis thaliana; identical to SEQ ID NO: 25228
  peptide (1)..(157): Ceres Seq. ID no. 13611557

SEQ ID NO: 114170 - DNA, 1354 bp, Arabidopsis thaliana; identical to SEQ ID NO: 102931
  misc_feature (1)..(1354): Ceres Seq. ID no. 13611558
  misc_feature (1)..(1354): Ortholog of  Ceres SEQ ID NO 13664220 as cited in SEQ ID NO 61151
  misc_feature (1)..(1354): Ortholog of  Ceres SEQ ID NO 13597477 as cited in SEQ ID NO 65160

SEQ ID NO: 114171 - protein, 384 aa, Arabidopsis thaliana; identical to SEQ ID NO: 102932
  peptide (1)..(384): Ceres Seq. ID no. 13611559

SEQ ID NO: 114172 - protein, 370 aa, Arabidopsis thaliana; identical to SEQ ID NO: 102933
  peptide (1)..(370): Ceres Seq. ID no. 13611560

SEQ ID NO: 114173 - protein, 328 aa, Arabidopsis thaliana; identical to SEQ ID NO: 102934
  peptide (1)..(328): Ceres Seq. ID no. 13611561

SEQ ID NO: 114174 - DNA, 748 bp, Arabidopsis thaliana; identical to SEQ ID NO: 102935
  misc_feature (1)..(748): Ceres Seq. ID no. 13611566
  misc_feature (1)..(748): Ortholog of  Ceres SEQ ID NO 13598160 as cited in SEQ ID NO 61317
  misc_feature (1)..(748): Ortholog of  Ceres SEQ ID NO 12614253 as cited in SEQ ID NO 68518

SEQ ID NO: 114175 - protein, 227 aa, Arabidopsis thaliana; identical to SEQ ID NO: 102936
  peptide (1)..(227): Ceres Seq. ID no. 13611567

SEQ ID NO: 114176 - protein, 222 aa, Arabidopsis thaliana; identical to SEQ ID NO: 28138
  peptide (1)..(222): Ceres Seq. ID no. 13611568

SEQ ID NO: 114177 - protein, 185 aa, Arabidopsis thaliana; identical to SEQ ID NO: 28139
  peptide (1)..(185): Ceres Seq. ID no. 13611569

SEQ ID NO: 114178 - DNA, 1136 bp, Arabidopsis thaliana; identical to SEQ ID NO: 102939
  misc_feature (1)..(1136): Ceres Seq. ID no. 13611574
  misc_feature (1)..(1136): Ortholog of  Ceres SEQ ID NO 15171279 as cited in SEQ ID NO 51378
  misc_feature (1)..(1136): Ortholog of  Ceres SEQ ID NO 13596816 as cited in SEQ ID NO 62287

SEQ ID NO: 114179 - protein, 334 aa, Arabidopsis thaliana; identical to SEQ ID NO: 102940
  peptide (1)..(334): Ceres Seq. ID no. 13611575

SEQ ID NO: 114180 - protein, 278 aa, Arabidopsis thaliana; identical to SEQ ID NO: 72448
  peptide (1)..(278): Ceres Seq. ID no. 13611576

SEQ ID NO: 114181 - protein, 200 aa, Arabidopsis thaliana; identical to SEQ ID NO: 72449
  peptide (1)..(200): Ceres Seq. ID no. 13611577

SEQ ID NO: 114182 - DNA, 1193 bp, Arabidopsis thaliana; identical to SEQ ID NO: 102943
  misc_feature (1)..(1193): Ceres Seq. ID no. 13611578
  misc_feature (1)..(1193): Ortholog of  Ceres SEQ ID NO 15171279 as cited in SEQ ID NO 51378
  misc_feature (1)..(1193): Ortholog of  Ceres SEQ ID NO 13596816 as cited in SEQ ID NO 62287

SEQ ID NO: 114183 - protein, 340 aa, Arabidopsis thaliana; identical to SEQ ID NO: 102944
  peptide (1)..(340): Ceres Seq. ID no. 13611579

SEQ ID NO: 114184 - protein, 237 aa, Arabidopsis thaliana; identical to SEQ ID NO: 102945
  peptide (1)..(237): Ceres Seq. ID no. 13611580

SEQ ID NO: 114185 - protein, 206 aa, Arabidopsis thaliana; identical to SEQ ID NO: 102946
  peptide (1)..(206): Ceres Seq. ID no. 13611581

SEQ ID NO: 114186 - DNA, 943 bp, Arabidopsis thaliana; identical to SEQ ID NO: 102947
  misc_feature (1)..(943): Ceres Seq. ID no. 13611582
  misc_feature (1)..(943): Ortholog of  Ceres SEQ ID NO 14301727 as cited in SEQ ID NO 61209

SEQ ID NO: 114187 - protein, 257 aa, Arabidopsis thaliana; identical to SEQ ID NO: 29559
  peptide (1)..(257): Ceres Seq. ID no. 13611583

SEQ ID NO: 114188 - protein, 226 aa, Arabidopsis thaliana; identical to SEQ ID NO: 29560
  peptide (1)..(226): Ceres Seq. ID no. 13611584

SEQ ID NO: 114189 - protein, 198 aa, Arabidopsis thaliana; identical to SEQ ID NO: 29561
  peptide (1)..(198): Ceres Seq. ID no. 13611585

SEQ ID NO: 114190 - DNA, 1152 bp, Arabidopsis thaliana; identical to SEQ ID NO: 102951
  misc_feature (1)..(1152): Ceres Seq. ID no. 13611590
  misc_feature (1)..(1152): Ortholog of  Ceres SEQ ID NO 15169703 as cited in SEQ ID NO 59628

SEQ ID NO: 114191 - protein, 256 aa, Arabidopsis thaliana; identical to SEQ ID NO: 102952
  peptide (1)..(256): Ceres Seq. ID no. 13611591

SEQ ID NO: 114192 - protein, 195 aa, Arabidopsis thaliana; identical to SEQ ID NO: 102953
  peptide (1)..(195): Ceres Seq. ID no. 13611592

SEQ ID NO: 114193 - protein, 153 aa, Arabidopsis thaliana; identical to SEQ ID NO: 102954
  peptide (1)..(153): Ceres Seq. ID no. 13611593

SEQ ID NO: 114194 - DNA, 2841 bp, Arabidopsis thaliana; identical to SEQ ID NO: 102955
  misc_feature (1)..(2841): Ceres Seq. ID no. 13611594
  misc_feature (1)..(2841): Ortholog of  Ceres SEQ ID NO 12586556 as cited in SEQ ID NO 64667
  misc_feature (1)..(2841): Ortholog of  Ceres SEQ ID NO 13660894 as cited in SEQ ID NO 67475

SEQ ID NO: 114195 - protein, 890 aa, Arabidopsis thaliana; identical to SEQ ID NO: 102956
  peptide (1)..(890): Ceres Seq. ID no. 13611595

SEQ ID NO: 114196 - protein, 803 aa, Arabidopsis thaliana; identical to SEQ ID NO: 72444
  peptide (1)..(803): Ceres Seq. ID no. 13611596

SEQ ID NO: 114197 - protein, 778 aa, Arabidopsis thaliana; identical to SEQ ID NO: 72445
  peptide (1)..(778): Ceres Seq. ID no. 13611597

SEQ ID NO: 114198 - DNA, 1973 bp, Arabidopsis thaliana; identical to SEQ ID NO: 102959
  misc_feature (1)..(1973): Ceres Seq. ID no. 13611598
  misc_feature (1)..(1973): Ortholog of  Ceres SEQ ID NO 13501807 as cited in SEQ ID NO 67558

SEQ ID NO: 114199 - protein, 576 aa, Arabidopsis thaliana; identical to SEQ ID NO: 35335
  peptide (1)..(576): Ceres Seq. ID no. 13611599

SEQ ID NO: 114200 - protein, 571 aa, Arabidopsis thaliana; identical to SEQ ID NO: 35336
  peptide (1)..(571): Ceres Seq. ID no. 13611600

SEQ ID NO: 114201 - protein, 435 aa, Arabidopsis thaliana; identical to SEQ ID NO: 35337
  peptide (1)..(435): Ceres Seq. ID no. 13611601

SEQ ID NO: 114202 - DNA, 1735 bp, Arabidopsis thaliana; identical to SEQ ID NO: 102963
  misc_feature (1)..(1735): Ceres Seq. ID no. 13611606
  misc_feature (1)..(1735): Ortholog of  Ceres SEQ ID NO 15174599 as cited in SEQ ID NO 53646
  misc_feature (1)..(1735): Ortholog of  Ceres SEQ ID NO 15174646 as cited in SEQ ID NO 54499

SEQ ID NO: 114203 - protein, 491 aa, Arabidopsis thaliana; identical to SEQ ID NO: 76486
  peptide (1)..(491): Ceres Seq. ID no. 13611607

SEQ ID NO: 114204 - protein, 438 aa, Arabidopsis thaliana; identical to SEQ ID NO: 76487
  peptide (1)..(438): Ceres Seq. ID no. 13611608

SEQ ID NO: 114205 - protein, 430 aa, Arabidopsis thaliana; identical to SEQ ID NO: 102966
  peptide (1)..(430): Ceres Seq. ID no. 13611609

SEQ ID NO: 114206 - DNA, 1206 bp, Arabidopsis thaliana; identical to SEQ ID NO: 102967
  misc_feature (1)..(1206): Ceres Seq. ID no. 13611610
  misc_feature (1)..(1206): Ortholog of  Ceres SEQ ID NO 14304057 as cited in SEQ ID NO 53782

SEQ ID NO: 114207 - protein, 354 aa, Arabidopsis thaliana; identical to SEQ ID NO: 102968
  peptide (1)..(354): Ceres Seq. ID no. 13611611

SEQ ID NO: 114208 - protein, 323 aa, Arabidopsis thaliana; identical to SEQ ID NO: 102969
  peptide (1)..(323): Ceres Seq. ID no. 13611612

SEQ ID NO: 114209 - DNA, 1355 bp, Arabidopsis thaliana; identical to SEQ ID NO: 102970
  misc_feature (1)..(1355): Ceres Seq. ID no. 13611620
  misc_feature (1)..(1355): Ortholog of  Ceres SEQ ID NO 14303116 as cited in SEQ ID NO 57665

SEQ ID NO: 114210 - protein, 344 aa, Arabidopsis thaliana; identical to SEQ ID NO: 102971
  peptide (1)..(344): Ceres Seq. ID no. 13611621

SEQ ID NO: 114211 - protein, 326 aa, Arabidopsis thaliana; identical to SEQ ID NO: 78172
  peptide (1)..(326): Ceres Seq. ID no. 13611622

SEQ ID NO: 114212 - protein, 174 aa, Arabidopsis thaliana; identical to SEQ ID NO: 25910
  peptide (1)..(174): Ceres Seq. ID no. 13611623

SEQ ID NO: 114213 - DNA, 1549 bp, Arabidopsis thaliana; identical to SEQ ID NO: 102974
  misc_feature (1)..(1549): Ceres Seq. ID no. 13611632
  misc_feature (1)..(1549): Ortholog of  Ceres SEQ ID NO 13663419 as cited in SEQ ID NO 66561

SEQ ID NO: 114214 - protein, 448 aa, Arabidopsis thaliana; identical to SEQ ID NO: 102975
  peptide (1)..(448): Ceres Seq. ID no. 13611633

SEQ ID NO: 114215 - protein, 441 aa, Arabidopsis thaliana; identical to SEQ ID NO: 102976
  peptide (1)..(441): Ceres Seq. ID no. 13611634

SEQ ID NO: 114216 - protein, 339 aa, Arabidopsis thaliana; identical to SEQ ID NO: 102977
  peptide (1)..(339): Ceres Seq. ID no. 13611635

SEQ ID NO: 114217 - DNA, 1403 bp, Arabidopsis thaliana; identical to SEQ ID NO: 102978
  misc_feature (1)..(1403): Ceres Seq. ID no. 13611636
  misc_feature (1)..(1403): Ortholog of  Ceres SEQ ID NO 14306538 as cited in SEQ ID NO 53117

SEQ ID NO: 114218 - protein, 420 aa, Arabidopsis thaliana; identical to SEQ ID NO: 102979
  peptide (1)..(420): Ceres Seq. ID no. 13611637

SEQ ID NO: 114219 - protein, 278 aa, Arabidopsis thaliana; identical to SEQ ID NO: 102980
  peptide (1)..(278): Ceres Seq. ID no. 13611638

SEQ ID NO: 114220 - DNA, 1220 bp, Arabidopsis thaliana; identical to SEQ ID NO: 102981
  misc_feature (1)..(1220): Ceres Seq. ID no. 13611639
  misc_feature (1)..(1220): Ortholog of  Ceres SEQ ID NO 14312266 as cited in SEQ ID NO 59225
  misc_feature (1)..(1220): Ortholog of  Ceres SEQ ID NO 13597620 as cited in SEQ ID NO 65383

SEQ ID NO: 114221 - protein, 293 aa, Arabidopsis thaliana; identical to SEQ ID NO: 25308
  peptide (1)..(293): Ceres Seq. ID no. 13611640

SEQ ID NO: 114222 - protein, 244 aa, Arabidopsis thaliana; identical to SEQ ID NO: 25309
  peptide (1)..(244): Ceres Seq. ID no. 13611641

SEQ ID NO: 114223 - protein, 203 aa, Arabidopsis thaliana; identical to SEQ ID NO: 25310
  peptide (1)..(203): Ceres Seq. ID no. 13611642

SEQ ID NO: 114224 - DNA, 718 bp, Arabidopsis thaliana; identical to SEQ ID NO: 102985
  misc_feature (1)..(718): Ceres Seq. ID no. 13611671
  misc_feature (1)..(718): Ortholog of  Ceres SEQ ID NO 15179051 as cited in SEQ ID NO 0

SEQ ID NO: 114225 - protein, 159 aa, Arabidopsis thaliana; identical to SEQ ID NO: 102986
  peptide (1)..(159): Ceres Seq. ID no. 13611672

SEQ ID NO: 114226 - protein, 134 aa, Arabidopsis thaliana; identical to SEQ ID NO: 102987
  peptide (1)..(134): Ceres Seq. ID no. 13611673

SEQ ID NO: 114227 - protein, 122 aa, Arabidopsis thaliana; identical to SEQ ID NO: 102988
  peptide (1)..(122): Ceres Seq. ID no. 13611674

SEQ ID NO: 114228 - DNA, 861 bp, Arabidopsis thaliana; identical to SEQ ID NO: 102989
  misc_feature (1)..(861): Ceres Seq. ID no. 13611694
  misc_feature (1)..(861): Ortholog of  Ceres SEQ ID NO 15175677 as cited in SEQ ID NO 55728

SEQ ID NO: 114229 - protein, 225 aa, Arabidopsis thaliana; identical to SEQ ID NO: 102990
  peptide (1)..(225): Ceres Seq. ID no. 13611695

SEQ ID NO: 114230 - protein, 210 aa, Arabidopsis thaliana; identical to SEQ ID NO: 102991
  peptide (1)..(210): Ceres Seq. ID no. 13611696

SEQ ID NO: 114231 - DNA, 1400 bp, Arabidopsis thaliana; identical to SEQ ID NO: 102992
  misc_feature (1)..(1400): Ceres Seq. ID no. 13611732
  misc_feature (1)..(1400): Ortholog of  Ceres SEQ ID NO 15177079 as cited in SEQ ID NO 51989
  misc_feature (1)..(1400): Ortholog of  Ceres SEQ ID NO 14315354 as cited in SEQ ID NO 58232
  misc_feature (1)..(1400): Ortholog of  Ceres SEQ ID NO 13596392 as cited in SEQ ID NO 62136
  misc_feature (1)..(1400): Ortholog of  Ceres SEQ ID NO 14313244 as cited in SEQ ID NO 66802
  misc_feature (1)..(1400): Ortholog of  Ceres SEQ ID NO 13654360 as cited in SEQ ID NO 67980
  misc_feature (1)..(1400): Ortholog of  Ceres SEQ ID NO 13596394 as cited in SEQ ID NO 68561

SEQ ID NO: 114232 - protein, 313 aa, Arabidopsis thaliana; identical to SEQ ID NO: 23777
  peptide (1)..(313): Ceres Seq. ID no. 13611733

SEQ ID NO: 114233 - protein, 292 aa, Arabidopsis thaliana; identical to SEQ ID NO: 23778
  peptide (1)..(292): Ceres Seq. ID no. 13611734

SEQ ID NO: 114234 - protein, 270 aa, Arabidopsis thaliana; identical to SEQ ID NO: 23779
  peptide (1)..(270): Ceres Seq. ID no. 13611735

SEQ ID NO: 114235 - DNA, 649 bp, Arabidopsis thaliana; identical to SEQ ID NO: 102996
  misc_feature (1)..(649): Ceres Seq. ID no. 13611740
  misc_feature (1)..(649): Ortholog of  Ceres SEQ ID NO 12583682 as cited in SEQ ID NO 56297

SEQ ID NO: 114236 - protein, 177 aa, Arabidopsis thaliana; identical to SEQ ID NO: 20793
  peptide (1)..(177): Ceres Seq. ID no. 13611741

SEQ ID NO: 114237 - protein, 173 aa, Arabidopsis thaliana; identical to SEQ ID NO: 20794
  peptide (1)..(173): Ceres Seq. ID no. 13611742

SEQ ID NO: 114238 - protein, 165 aa, Arabidopsis thaliana; identical to SEQ ID NO: 20795
  peptide (1)..(165): Ceres Seq. ID no. 13611743

SEQ ID NO: 114239 - DNA, 728 bp, Arabidopsis thaliana; identical to SEQ ID NO: 103000
  misc_feature (1)..(728): Ceres Seq. ID no. 13611748
  misc_feature (1)..(728): Ortholog of  Ceres SEQ ID NO 13594501 as cited in SEQ ID NO 51327

SEQ ID NO: 114240 - protein, 142 aa, Arabidopsis thaliana; identical to SEQ ID NO: 40131
  peptide (1)..(142): Ceres Seq. ID no. 13611749

SEQ ID NO: 114241 - DNA, 1224 bp, Arabidopsis thaliana; identical to SEQ ID NO: 103002
  misc_feature (1)..(1224): Ceres Seq. ID no. 13611750
  misc_feature (1)..(1224): Ortholog of  Ceres SEQ ID NO 13502952 as cited in SEQ ID NO 62271
  misc_feature (1)..(1224): Ortholog of  Ceres SEQ ID NO 13502973 as cited in SEQ ID NO 68052
  misc_feature (1)..(1224): Ortholog of  Ceres SEQ ID NO 13596000 as cited in SEQ ID NO 68188

SEQ ID NO: 114242 - protein, 385 aa, Arabidopsis thaliana; identical to SEQ ID NO: 25022
  peptide (1)..(385): Ceres Seq. ID no. 13611751

SEQ ID NO: 114243 - protein, 376 aa, Arabidopsis thaliana; identical to SEQ ID NO: 25023
  peptide (1)..(376): Ceres Seq. ID no. 13611752

SEQ ID NO: 114244 - protein, 337 aa, Arabidopsis thaliana; identical to SEQ ID NO: 25024
  peptide (1)..(337): Ceres Seq. ID no. 13611753

SEQ ID NO: 114245 - DNA, 1505 bp, Arabidopsis thaliana; identical to SEQ ID NO: 103006
  misc_feature (1)..(1505): Ceres Seq. ID no. 13611762
  misc_feature (1)..(1505): Ortholog of  Ceres SEQ ID NO 13497992 as cited in SEQ ID NO 58175

SEQ ID NO: 114246 - protein, 367 aa, Arabidopsis thaliana; identical to SEQ ID NO: 40394
  peptide (1)..(367): Ceres Seq. ID no. 13611763

SEQ ID NO: 114247 - protein, 313 aa, Arabidopsis thaliana; identical to SEQ ID NO: 40395
  peptide (1)..(313): Ceres Seq. ID no. 13611764

SEQ ID NO: 114248 - DNA, 1864 bp, Arabidopsis thaliana; identical to SEQ ID NO: 103009
  misc_feature (1)..(1864): Ceres Seq. ID no. 13611775
  misc_feature (1)..(1864): Ortholog of  Ceres SEQ ID NO 15177343 as cited in SEQ ID NO 51182

SEQ ID NO: 114249 - protein, 552 aa, Arabidopsis thaliana; identical to SEQ ID NO: 103010
  peptide (1)..(552): Ceres Seq. ID no. 13611776

SEQ ID NO: 114250 - protein, 539 aa, Arabidopsis thaliana; identical to SEQ ID NO: 103011
  peptide (1)..(539): Ceres Seq. ID no. 13611777

SEQ ID NO: 114251 - protein, 520 aa, Arabidopsis thaliana; identical to SEQ ID NO: 77854
  peptide (1)..(520): Ceres Seq. ID no. 13611778

SEQ ID NO: 114252 - DNA, 1293 bp, Arabidopsis thaliana; identical to SEQ ID NO: 103013
  misc_feature (1)..(1293): Ceres Seq. ID no. 13611783
  misc_feature (1)..(1293): Ortholog of  Ceres SEQ ID NO 14304863 as cited in SEQ ID NO 54200
  misc_feature (1)..(1293): Ortholog of  Ceres SEQ ID NO 13598340 as cited in SEQ ID NO 68543

SEQ ID NO: 114253 - protein, 353 aa, Arabidopsis thaliana; identical to SEQ ID NO: 103014
  peptide (1)..(353): Ceres Seq. ID no. 13611784

SEQ ID NO: 114254 - protein, 330 aa, Arabidopsis thaliana; identical to SEQ ID NO: 21976
  peptide (1)..(330): Ceres Seq. ID no. 13611785

SEQ ID NO: 114255 - protein, 259 aa, Arabidopsis thaliana; identical to SEQ ID NO: 21977
  peptide (1)..(259): Ceres Seq. ID no. 13611786

SEQ ID NO: 114256 - DNA, 989 bp, Arabidopsis thaliana; identical to SEQ ID NO: 103017
  misc_feature (1)..(989): Ceres Seq. ID no. 13611791
  misc_feature (1)..(989): Ortholog of  Ceres SEQ ID NO 12608730 as cited in SEQ ID NO 58313

SEQ ID NO: 114257 - protein, 115 aa, Arabidopsis thaliana; identical to SEQ ID NO: 27158
  peptide (1)..(115): Ceres Seq. ID no. 13611792

SEQ ID NO: 114258 - protein, 75 aa, Arabidopsis thaliana; identical to SEQ ID NO: 27159
  peptide (1)..(75): Ceres Seq. ID no. 13611793

SEQ ID NO: 114259 - protein, 74 aa, Arabidopsis thaliana; identical to SEQ ID NO: 103020
  peptide (1)..(74): Ceres Seq. ID no. 13611794

SEQ ID NO: 114260 - DNA, 841 bp, Arabidopsis thaliana; identical to SEQ ID NO: 103021
  misc_feature (1)..(841): Ceres Seq. ID no. 13611795
  misc_feature (1)..(841): Ortholog of  Ceres SEQ ID NO 15178133 as cited in SEQ ID NO 0

SEQ ID NO: 114261 - protein, 197 aa, Arabidopsis thaliana; identical to SEQ ID NO: 103022
  peptide (1)..(197): Ceres Seq. ID no. 13611796

SEQ ID NO: 114262 - protein, 175 aa, Arabidopsis thaliana; identical to SEQ ID NO: 103023
  peptide (1)..(175): Ceres Seq. ID no. 13611797

SEQ ID NO: 114263 - protein, 153 aa, Arabidopsis thaliana; identical to SEQ ID NO: 103024
  peptide (1)..(153): Ceres Seq. ID no. 13611798

SEQ ID NO: 114264 - DNA, 1023 bp, Arabidopsis thaliana; identical to SEQ ID NO: 103025
  misc_feature (1)..(1023): Ceres Seq. ID no. 13611814
  misc_feature (1)..(1023): Ortholog of  Ceres SEQ ID NO 13655934 as cited in SEQ ID NO 65278
  misc_feature (1)..(1023): Ortholog of  Ceres SEQ ID NO 15180098 as cited in SEQ ID NO 0

SEQ ID NO: 114265 - protein, 270 aa, Arabidopsis thaliana; identical to SEQ ID NO: 35068
  peptide (1)..(270): Ceres Seq. ID no. 13611815

SEQ ID NO: 114266 - protein, 252 aa, Arabidopsis thaliana; identical to SEQ ID NO: 35069
  peptide (1)..(252): Ceres Seq. ID no. 13611816

SEQ ID NO: 114267 - DNA, 1806 bp, Arabidopsis thaliana; identical to SEQ ID NO: 103028
  misc_feature (1)..(1806): Ceres Seq. ID no. 13611825
  misc_feature (1)..(1806): Ortholog of  Ceres SEQ ID NO 15169264 as cited in SEQ ID NO 55026
  misc_feature (1)..(1806): Ortholog of  Ceres SEQ ID NO 15224709 as cited in SEQ ID NO 68627

SEQ ID NO: 114268 - protein, 522 aa, Arabidopsis thaliana; identical to SEQ ID NO: 103029
  peptide (1)..(522): Ceres Seq. ID no. 13611826

SEQ ID NO: 114269 - protein, 503 aa, Arabidopsis thaliana; identical to SEQ ID NO: 103030
  peptide (1)..(503): Ceres Seq. ID no. 13611827

SEQ ID NO: 114270 - protein, 461 aa, Arabidopsis thaliana; identical to SEQ ID NO: 103031
  peptide (1)..(461): Ceres Seq. ID no. 13611828

SEQ ID NO: 114271 - DNA, 1291 bp, Arabidopsis thaliana; identical to SEQ ID NO: 103032
  misc_feature (1)..(1291): Ceres Seq. ID no. 13611829
  misc_feature (1)..(1291): Ortholog of  Ceres SEQ ID NO 15176333 as cited in SEQ ID NO 52787
  misc_feature (1)..(1291): Ortholog of  Ceres SEQ ID NO 15170403 as cited in SEQ ID NO 53457
  misc_feature (1)..(1291): Ortholog of  Ceres SEQ ID NO 14303479 as cited in SEQ ID NO 54254
  misc_feature (1)..(1291): Ortholog of  Ceres SEQ ID NO 14312047 as cited in SEQ ID NO 55656
  misc_feature (1)..(1291): Ortholog of  Ceres SEQ ID NO 13660872 as cited in SEQ ID NO 60830
  misc_feature (1)..(1291): Ortholog of  Ceres SEQ ID NO 12616221 as cited in SEQ ID NO 63291
  misc_feature (1)..(1291): Ortholog of  Ceres SEQ ID NO 14302355 as cited in SEQ ID NO 65830

SEQ ID NO: 114272 - protein, 289 aa, Arabidopsis thaliana; identical to SEQ ID NO: 34865
  peptide (1)..(289): Ceres Seq. ID no. 13611830

SEQ ID NO: 114273 - protein, 268 aa, Arabidopsis thaliana; identical to SEQ ID NO: 34866
  peptide (1)..(268): Ceres Seq. ID no. 13611831

SEQ ID NO: 114274 - protein, 164 aa, Arabidopsis thaliana; identical to SEQ ID NO: 34867
  peptide (1)..(164): Ceres Seq. ID no. 13611832

SEQ ID NO: 114275 - DNA, 1511 bp, Arabidopsis thaliana; identical to SEQ ID NO: 103036
  misc_feature (1)..(1511): Ceres Seq. ID no. 13611837
  misc_feature (1)..(1511): Ortholog of  Ceres SEQ ID NO 14307288 as cited in SEQ ID NO 54318

SEQ ID NO: 114276 - protein, 353 aa, Arabidopsis thaliana; identical to SEQ ID NO: 103037
  peptide (1)..(353): Ceres Seq. ID no. 13611838

SEQ ID NO: 114277 - protein, 269 aa, Arabidopsis thaliana; identical to SEQ ID NO: 103038
  peptide (1)..(269): Ceres Seq. ID no. 13611839

SEQ ID NO: 114278 - protein, 258 aa, Arabidopsis thaliana; identical to SEQ ID NO: 103039
  peptide (1)..(258): Ceres Seq. ID no. 13611840

SEQ ID NO: 114279 - DNA, 1662 bp, Arabidopsis thaliana; identical to SEQ ID NO: 103040
  misc_feature (1)..(1662): Ceres Seq. ID no. 13611845
  misc_feature (1)..(1662): Ortholog of  Ceres SEQ ID NO 13656435 as cited in SEQ ID NO 65853

SEQ ID NO: 114280 - protein, 434 aa, Arabidopsis thaliana; identical to SEQ ID NO: 40836
  peptide (1)..(434): Ceres Seq. ID no. 13611846

SEQ ID NO: 114281 - protein, 419 aa, Arabidopsis thaliana; identical to SEQ ID NO: 40837
  peptide (1)..(419): Ceres Seq. ID no. 13611847

SEQ ID NO: 114282 - protein, 418 aa, Arabidopsis thaliana; identical to SEQ ID NO: 40838
  peptide (1)..(418): Ceres Seq. ID no. 13611848

SEQ ID NO: 114283 - DNA, 1365 bp, Arabidopsis thaliana; identical to SEQ ID NO: 103044
  misc_feature (1)..(1365): Ceres Seq. ID no. 13611852
  misc_feature (1)..(1365): Ortholog of  Ceres SEQ ID NO 13586135 as cited in SEQ ID NO 1210
  misc_feature (1)..(1365): Ortholog of  Ceres SEQ ID NO 13654329 as cited in SEQ ID NO 68717

SEQ ID NO: 114284 - protein, 362 aa, Arabidopsis thaliana; identical to SEQ ID NO: 22660
  peptide (1)..(362): Ceres Seq. ID no. 13611853

SEQ ID NO: 114285 - protein, 210 aa, Arabidopsis thaliana; identical to SEQ ID NO: 22661
  peptide (1)..(210): Ceres Seq. ID no. 13611854

SEQ ID NO: 114286 - DNA, 822 bp, Arabidopsis thaliana; identical to SEQ ID NO: 103047
  misc_feature (1)..(822): Ceres Seq. ID no. 13611855
  misc_feature (1)..(822): Ortholog of  Ceres SEQ ID NO 13599568 as cited in SEQ ID NO 509
  misc_feature (1)..(822): Ortholog of  Ceres SEQ ID NO 13638595 as cited in SEQ ID NO 52050
  misc_feature (1)..(822): Ortholog of  Ceres SEQ ID NO 13594748 as cited in SEQ ID NO 52114
  misc_feature (1)..(822): Ortholog of  Ceres SEQ ID NO 12623490 as cited in SEQ ID NO 61136
  misc_feature (1)..(822): Ortholog of  Ceres SEQ ID NO 12583993 as cited in SEQ ID NO 68098
  misc_feature (1)..(822): Ortholog of  Ceres SEQ ID NO 13654535 as cited in SEQ ID NO 68227

SEQ ID NO: 114287 - protein, 219 aa, Arabidopsis thaliana; identical to SEQ ID NO: 103048
  peptide (1)..(219): Ceres Seq. ID no. 13611856

SEQ ID NO: 114288 - protein, 218 aa, Arabidopsis thaliana; identical to SEQ ID NO: 103049
  peptide (1)..(218): Ceres Seq. ID no. 13611857

SEQ ID NO: 114289 - protein, 204 aa, Arabidopsis thaliana; identical to SEQ ID NO: 103050
  peptide (1)..(204): Ceres Seq. ID no. 13611858

SEQ ID NO: 114290 - DNA, 989 bp, Arabidopsis thaliana; identical to SEQ ID NO: 103051
  misc_feature (1)..(989): Ceres Seq. ID no. 13611863
  misc_feature (1)..(989): Ortholog of  Ceres SEQ ID NO 14307280 as cited in SEQ ID NO 59443
  misc_feature (1)..(989): Ortholog of  Ceres SEQ ID NO 14316536 as cited in SEQ ID NO 60272
  misc_feature (1)..(989): Ortholog of  Ceres SEQ ID NO 13597264 as cited in SEQ ID NO 63897
  misc_feature (1)..(989): Ortholog of  Ceres SEQ ID NO 13598570 as cited in SEQ ID NO 65434
  misc_feature (1)..(989): Ortholog of  Ceres SEQ ID NO 13656452 as cited in SEQ ID NO 65745
  misc_feature (1)..(989): Ortholog of  Ceres SEQ ID NO 13660333 as cited in SEQ ID NO 67464
  misc_feature (1)..(989): Ortholog of  Ceres SEQ ID NO 13596238 as cited in SEQ ID NO 68834
  misc_feature (1)..(989): Ortholog of  Ceres SEQ ID NO 15174329 as cited in SEQ ID NO 0

SEQ ID NO: 114291 - protein, 280 aa, Arabidopsis thaliana; identical to SEQ ID NO: 103052
  peptide (1)..(280): Ceres Seq. ID no. 13611864

SEQ ID NO: 114292 - protein, 272 aa, Arabidopsis thaliana; identical to SEQ ID NO: 103053
  peptide (1)..(272): Ceres Seq. ID no. 13611865

SEQ ID NO: 114293 - DNA, 1787 bp, Arabidopsis thaliana; identical to SEQ ID NO: 103054
  misc_feature (1)..(1787): Ceres Seq. ID no. 13611866
  misc_feature (1)..(1787): Ortholog of  Ceres SEQ ID NO 13658728 as cited in SEQ ID NO 66270
  misc_feature (1)..(1787): Ortholog of  Ceres SEQ ID NO 12465428 as cited in SEQ ID NO 68898

SEQ ID NO: 114294 - protein, 542 aa, Arabidopsis thaliana; identical to SEQ ID NO: 103055
  peptide (1)..(542): Ceres Seq. ID no. 13611867

SEQ ID NO: 114295 - protein, 537 aa, Arabidopsis thaliana; identical to SEQ ID NO: 103056
  peptide (1)..(537): Ceres Seq. ID no. 13611868

SEQ ID NO: 114296 - protein, 459 aa, Arabidopsis thaliana; identical to SEQ ID NO: 103057
  peptide (1)..(459): Ceres Seq. ID no. 13611869

SEQ ID NO: 114297 - DNA, 639 bp, Arabidopsis thaliana; identical to SEQ ID NO: 103058
  misc_feature (1)..(639): Ceres Seq. ID no. 13611892
  misc_feature (1)..(639): Ortholog of  Ceres SEQ ID NO 14305657 as cited in SEQ ID NO 52544

SEQ ID NO: 114298 - protein, 159 aa, Arabidopsis thaliana; identical to SEQ ID NO: 103059
  peptide (1)..(159): Ceres Seq. ID no. 13611893

SEQ ID NO: 114299 - protein, 146 aa, Arabidopsis thaliana; identical to SEQ ID NO: 26350
  peptide (1)..(146): Ceres Seq. ID no. 13611894

SEQ ID NO: 114300 - protein, 117 aa, Arabidopsis thaliana; identical to SEQ ID NO: 26351
  peptide (1)..(117): Ceres Seq. ID no. 13611895

SEQ ID NO: 114301 - DNA, 1132 bp, Arabidopsis thaliana; identical to SEQ ID NO: 103062
  misc_feature (1)..(1132): Ceres Seq. ID no. 13611896
  misc_feature (1)..(1132): Ortholog of  Ceres SEQ ID NO 13594341 as cited in SEQ ID NO 57917
  misc_feature (1)..(1132): Ortholog of  Ceres SEQ ID NO 13656441 as cited in SEQ ID NO 65703

SEQ ID NO: 114302 - protein, 310 aa, Arabidopsis thaliana; identical to SEQ ID NO: 41933
  peptide (1)..(310): Ceres Seq. ID no. 13611897

SEQ ID NO: 114303 - protein, 305 aa, Arabidopsis thaliana; identical to SEQ ID NO: 41934
  peptide (1)..(305): Ceres Seq. ID no. 13611898

SEQ ID NO: 114304 - protein, 252 aa, Arabidopsis thaliana; identical to SEQ ID NO: 41935
  peptide (1)..(252): Ceres Seq. ID no. 13611899

SEQ ID NO: 114305 - DNA, 708 bp, Arabidopsis thaliana; identical to SEQ ID NO: 103066
  misc_feature (1)..(708): Ceres Seq. ID no. 13611900
  misc_feature (1)..(708): Ortholog of  Ceres SEQ ID NO 15170822 as cited in SEQ ID NO 52758
  misc_feature (1)..(708): Ortholog of  Ceres SEQ ID NO 12611129 as cited in SEQ ID NO 55967
  misc_feature (1)..(708): Ortholog of  Ceres SEQ ID NO 12584296 as cited in SEQ ID NO 67866
  misc_feature (1)..(708): Ortholog of  Ceres SEQ ID NO 15178857 as cited in SEQ ID NO 0

SEQ ID NO: 114306 - protein, 154 aa, Arabidopsis thaliana; identical to SEQ ID NO: 21064
  peptide (1)..(154): Ceres Seq. ID no. 13611901

SEQ ID NO: 114307 - DNA, 1487 bp, Arabidopsis thaliana; identical to SEQ ID NO: 103068
  misc_feature (1)..(1487): Ceres Seq. ID no. 13611906
  misc_feature (1)..(1487): Ortholog of  Ceres SEQ ID NO 13594104 as cited in SEQ ID NO 55505

SEQ ID NO: 114308 - protein, 416 aa, Arabidopsis thaliana; identical to SEQ ID NO: 26933
  peptide (1)..(416): Ceres Seq. ID no. 13611907

SEQ ID NO: 114309 - protein, 369 aa, Arabidopsis thaliana; identical to SEQ ID NO: 26934
  peptide (1)..(369): Ceres Seq. ID no. 13611908

SEQ ID NO: 114310 - protein, 355 aa, Arabidopsis thaliana; identical to SEQ ID NO: 26935
  peptide (1)..(355): Ceres Seq. ID no. 13611909

SEQ ID NO: 114311 - DNA, 1169 bp, Arabidopsis thaliana; identical to SEQ ID NO: 103072
  misc_feature (1)..(1169): Ceres Seq. ID no. 13611910
  misc_feature (1)..(1169): Ortholog of  Ceres SEQ ID NO 14316095 as cited in SEQ ID NO 52477

SEQ ID NO: 114312 - protein, 363 aa, Arabidopsis thaliana; identical to SEQ ID NO: 103073
  peptide (1)..(363): Ceres Seq. ID no. 13611911

SEQ ID NO: 114313 - protein, 215 aa, Arabidopsis thaliana; identical to SEQ ID NO: 103074
  peptide (1)..(215): Ceres Seq. ID no. 13611912

SEQ ID NO: 114314 - DNA, 1647 bp, Arabidopsis thaliana; identical to SEQ ID NO: 103075
  misc_feature (1)..(1647): Ceres Seq. ID no. 13611931
  misc_feature (1)..(1647): Ortholog of  Ceres SEQ ID NO 14302251 as cited in SEQ ID NO 62093

SEQ ID NO: 114315 - protein, 409 aa, Arabidopsis thaliana; identical to SEQ ID NO: 103076
  peptide (1)..(409): Ceres Seq. ID no. 13611932

SEQ ID NO: 114316 - protein, 337 aa, Arabidopsis thaliana; identical to SEQ ID NO: 22500
  peptide (1)..(337): Ceres Seq. ID no. 13611933

SEQ ID NO: 114317 - protein, 309 aa, Arabidopsis thaliana; identical to SEQ ID NO: 22501
  peptide (1)..(309): Ceres Seq. ID no. 13611934

SEQ ID NO: 114318 - DNA, 1077 bp, Arabidopsis thaliana; identical to SEQ ID NO: 103079
  misc_feature (1)..(1077): Ceres Seq. ID no. 13611935
  misc_feature (1)..(1077): Ortholog of  Ceres SEQ ID NO 15177991 as cited in SEQ ID NO 53915
  misc_feature (1)..(1077): Ortholog of  Ceres SEQ ID NO 15174347 as cited in SEQ ID NO 58577
  misc_feature (1)..(1077): Ortholog of  Ceres SEQ ID NO 13596609 as cited in SEQ ID NO 63070
  misc_feature (1)..(1077): Ortholog of  Ceres SEQ ID NO 12616895 as cited in SEQ ID NO 63909
  misc_feature (1)..(1077): Ortholog of  Ceres SEQ ID NO 14302096 as cited in SEQ ID NO 68356
  misc_feature (1)..(1077): Ortholog of  Ceres SEQ ID NO 13598574 as cited in SEQ ID NO 69083

SEQ ID NO: 114319 - protein, 285 aa, Arabidopsis thaliana; identical to SEQ ID NO: 103080
  peptide (1)..(285): Ceres Seq. ID no. 13611936

SEQ ID NO: 114320 - protein, 232 aa, Arabidopsis thaliana; identical to SEQ ID NO: 103081
  peptide (1)..(232): Ceres Seq. ID no. 13611937

SEQ ID NO: 114321 - protein, 214 aa, Arabidopsis thaliana; identical to SEQ ID NO: 103082
  peptide (1)..(214): Ceres Seq. ID no. 13611938

SEQ ID NO: 114322 - DNA, 1039 bp, Arabidopsis thaliana; identical to SEQ ID NO: 103083
  misc_feature (1)..(1039): Ceres Seq. ID no. 13611939
  misc_feature (1)..(1039): Ortholog of  Ceres SEQ ID NO 14312281 as cited in SEQ ID NO 59172
  misc_feature (1)..(1039): Ortholog of  Ceres SEQ ID NO 15174396 as cited in SEQ ID NO 0

SEQ ID NO: 114323 - protein, 247 aa, Arabidopsis thaliana; identical to SEQ ID NO: 30451
  peptide (1)..(247): Ceres Seq. ID no. 13611940

SEQ ID NO: 114324 - protein, 199 aa, Arabidopsis thaliana; identical to SEQ ID NO: 30452
  peptide (1)..(199): Ceres Seq. ID no. 13611941

SEQ ID NO: 114325 - DNA, 1664 bp, Arabidopsis thaliana; identical to SEQ ID NO: 103086
  misc_feature (1)..(1664): Ceres Seq. ID no. 13611942
  misc_feature (1)..(1664): Ortholog of  Ceres SEQ ID NO 14301587 as cited in SEQ ID NO 66080

SEQ ID NO: 114326 - protein, 438 aa, Arabidopsis thaliana; identical to SEQ ID NO: 42571
  peptide (1)..(438): Ceres Seq. ID no. 13611943

SEQ ID NO: 114327 - protein, 419 aa, Arabidopsis thaliana; identical to SEQ ID NO: 42572
  peptide (1)..(419): Ceres Seq. ID no. 13611944

SEQ ID NO: 114328 - protein, 413 aa, Arabidopsis thaliana; identical to SEQ ID NO: 42573
  peptide (1)..(413): Ceres Seq. ID no. 13611945

SEQ ID NO: 114329 - DNA, 673 bp, Arabidopsis thaliana; identical to SEQ ID NO: 103090
  misc_feature (1)..(673): Ceres Seq. ID no. 13611954
  misc_feature (1)..(673): Ortholog of  Ceres SEQ ID NO 14307370 as cited in SEQ ID NO 54127
  misc_feature (1)..(673): Ortholog of  Ceres SEQ ID NO 13596338 as cited in SEQ ID NO 68005

SEQ ID NO: 114330 - protein, 174 aa, Arabidopsis thaliana; identical to SEQ ID NO: 103091
  peptide (1)..(174): Ceres Seq. ID no. 13611955

SEQ ID NO: 114331 - protein, 171 aa, Arabidopsis thaliana; identical to SEQ ID NO: 103092
  peptide (1)..(171): Ceres Seq. ID no. 13611956

SEQ ID NO: 114332 - protein, 141 aa, Arabidopsis thaliana; identical to SEQ ID NO: 103093
  peptide (1)..(141): Ceres Seq. ID no. 13611957

SEQ ID NO: 114333 - DNA, 1115 bp, Arabidopsis thaliana; identical to SEQ ID NO: 103094
  misc_feature (1)..(1115): Ceres Seq. ID no. 13611958
  misc_feature (1)..(1115): Ortholog of  Ceres SEQ ID NO 12617197 as cited in SEQ ID NO 63406
  misc_feature (1)..(1115): Ortholog of  Ceres SEQ ID NO 13597804 as cited in SEQ ID NO 64182
  misc_feature (1)..(1115): Ortholog of  Ceres SEQ ID NO 14301622 as cited in SEQ ID NO 65156
  misc_feature (1)..(1115): Ortholog of  Ceres SEQ ID NO 13598565 as cited in SEQ ID NO 65250
  misc_feature (1)..(1115): Ortholog of  Ceres SEQ ID NO 13598597 as cited in SEQ ID NO 65496
  misc_feature (1)..(1115): Ortholog of  Ceres SEQ ID NO 13596284 as cited in SEQ ID NO 68273

SEQ ID NO: 114334 - protein, 332 aa, Arabidopsis thaliana; identical to SEQ ID NO: 103095
  peptide (1)..(332): Ceres Seq. ID no. 13611959

SEQ ID NO: 114335 - protein, 319 aa, Arabidopsis thaliana; identical to SEQ ID NO: 103096
  peptide (1)..(319): Ceres Seq. ID no. 13611960

SEQ ID NO: 114336 - protein, 280 aa, Arabidopsis thaliana; identical to SEQ ID NO: 103097
  peptide (1)..(280): Ceres Seq. ID no. 13611961

SEQ ID NO: 114337 - DNA, 470 bp, Arabidopsis thaliana; identical to SEQ ID NO: 103098
  misc_feature (1)..(470): Ceres Seq. ID no. 13611962
  misc_feature (1)..(470): Ortholog of  Ceres SEQ ID NO 14309158 as cited in SEQ ID NO 0

SEQ ID NO: 114338 - protein, 111 aa, Arabidopsis thaliana; identical to SEQ ID NO: 35767
  peptide (1)..(111): Ceres Seq. ID no. 13611963

SEQ ID NO: 114339 - protein, 102 aa, Arabidopsis thaliana; identical to SEQ ID NO: 24515
  peptide (1)..(102): Ceres Seq. ID no. 13611964

SEQ ID NO: 114340 - DNA, 604 bp, Arabidopsis thaliana; identical to SEQ ID NO: 103101
  misc_feature (1)..(604): Ceres Seq. ID no. 13611974
  misc_feature (1)..(604): Ortholog of  Ceres SEQ ID NO 13600048 as cited in SEQ ID NO 377
  misc_feature (1)..(604): Ortholog of  Ceres SEQ ID NO 15173379 as cited in SEQ ID NO 63694

SEQ ID NO: 114341 - protein, 141 aa, Arabidopsis thaliana; identical to SEQ ID NO: 20875
  peptide (1)..(141): Ceres Seq. ID no. 13611975

SEQ ID NO: 114342 - protein, 75 aa, Arabidopsis thaliana; identical to SEQ ID NO: 20876
  peptide (1)..(75): Ceres Seq. ID no. 13611976

SEQ ID NO: 114343 - protein, 73 aa, Arabidopsis thaliana; identical to SEQ ID NO: 20877
  peptide (1)..(73): Ceres Seq. ID no. 13611977

SEQ ID NO: 114344 - DNA, 1420 bp, Arabidopsis thaliana; identical to SEQ ID NO: 103105
  misc_feature (1)..(1420): Ceres Seq. ID no. 13611978
  misc_feature (1)..(1420): Ortholog of  Ceres SEQ ID NO 15177104 as cited in SEQ ID NO 56048

SEQ ID NO: 114345 - protein, 350 aa, Arabidopsis thaliana; identical to SEQ ID NO: 29221
  peptide (1)..(350): Ceres Seq. ID no. 13611979

SEQ ID NO: 114346 - protein, 344 aa, Arabidopsis thaliana; identical to SEQ ID NO: 29222
  peptide (1)..(344): Ceres Seq. ID no. 13611980

SEQ ID NO: 114347 - protein, 262 aa, Arabidopsis thaliana; identical to SEQ ID NO: 29223
  peptide (1)..(262): Ceres Seq. ID no. 13611981

SEQ ID NO: 114348 - DNA, 1048 bp, Arabidopsis thaliana; identical to SEQ ID NO: 103109
  misc_feature (1)..(1048): Ceres Seq. ID no. 13612002
  misc_feature (1)..(1048): Ortholog of  Ceres SEQ ID NO 12473977 as cited in SEQ ID NO 133
  misc_feature (1)..(1048): Ortholog of  Ceres SEQ ID NO 12585294 as cited in SEQ ID NO 63023

SEQ ID NO: 114349 - protein, 253 aa, Arabidopsis thaliana; identical to SEQ ID NO: 103110
  peptide (1)..(253): Ceres Seq. ID no. 13612003

SEQ ID NO: 114350 - protein, 216 aa, Arabidopsis thaliana; identical to SEQ ID NO: 42255
  peptide (1)..(216): Ceres Seq. ID no. 13612004

SEQ ID NO: 114351 - DNA, 1483 bp, Arabidopsis thaliana; identical to SEQ ID NO: 103112
  misc_feature (1)..(1483): Ceres Seq. ID no. 13612013
  misc_feature (1)..(1483): Ortholog of  Ceres SEQ ID NO 15177221 as cited in SEQ ID NO 53046
  misc_feature (1)..(1483): Ortholog of  Ceres SEQ ID NO 14315134 as cited in SEQ ID NO 59476
  misc_feature (1)..(1483): Ortholog of  Ceres SEQ ID NO 12616332 as cited in SEQ ID NO 63449
  misc_feature (1)..(1483): Ortholog of  Ceres SEQ ID NO 13597498 as cited in SEQ ID NO 64648
  misc_feature (1)..(1483): Ortholog of  Ceres SEQ ID NO 14308053 as cited in SEQ ID NO 67790

SEQ ID NO: 114352 - protein, 419 aa, Arabidopsis thaliana; identical to SEQ ID NO: 103113
  peptide (1)..(419): Ceres Seq. ID no. 13612014

SEQ ID NO: 114353 - protein, 398 aa, Arabidopsis thaliana; identical to SEQ ID NO: 103114
  peptide (1)..(398): Ceres Seq. ID no. 13612015

SEQ ID NO: 114354 - protein, 386 aa, Arabidopsis thaliana; identical to SEQ ID NO: 103115
  peptide (1)..(386): Ceres Seq. ID no. 13612016

SEQ ID NO: 114355 - DNA, 1261 bp, Arabidopsis thaliana; identical to SEQ ID NO: 103116
  misc_feature (1)..(1261): Ceres Seq. ID no. 13612017
  misc_feature (1)..(1261): Ortholog of  Ceres SEQ ID NO 14311493 as cited in SEQ ID NO 51440
  misc_feature (1)..(1261): Ortholog of  Ceres SEQ ID NO 15177312 as cited in SEQ ID NO 52762

SEQ ID NO: 114356 - protein, 333 aa, Arabidopsis thaliana; identical to SEQ ID NO: 24815
  peptide (1)..(333): Ceres Seq. ID no. 13612018

SEQ ID NO: 114357 - protein, 314 aa, Arabidopsis thaliana; identical to SEQ ID NO: 24816
  peptide (1)..(314): Ceres Seq. ID no. 13612019

SEQ ID NO: 114358 - protein, 301 aa, Arabidopsis thaliana; identical to SEQ ID NO: 24817
  peptide (1)..(301): Ceres Seq. ID no. 13612020

SEQ ID NO: 114359 - DNA, 776 bp, Arabidopsis thaliana; identical to SEQ ID NO: 103120
  misc_feature (1)..(776): Ceres Seq. ID no. 13612027
  misc_feature (1)..(776): Ortholog of  Ceres SEQ ID NO 15178866 as cited in SEQ ID NO 1133

SEQ ID NO: 114360 - protein, 187 aa, Arabidopsis thaliana; identical to SEQ ID NO: 103121
  peptide (1)..(187): Ceres Seq. ID no. 13612028

SEQ ID NO: 114361 - protein, 174 aa, Arabidopsis thaliana; identical to SEQ ID NO: 39959
  peptide (1)..(174): Ceres Seq. ID no. 13612029

SEQ ID NO: 114362 - DNA, 4071 bp, Arabidopsis thaliana; identical to SEQ ID NO: 103123
  misc_feature (1)..(4071): Ceres Seq. ID no. 13612036
  misc_feature (1)..(4071): Ortholog of  Ceres SEQ ID NO 13600310 as cited in SEQ ID NO 5086

SEQ ID NO: 114363 - protein, 1260 aa, Arabidopsis thaliana; identical to SEQ ID NO: 103124
  peptide (1)..(1260): Ceres Seq. ID no. 13612037

SEQ ID NO: 114364 - protein, 1181 aa, Arabidopsis thaliana; identical to SEQ ID NO: 103125
  peptide (1)..(1181): Ceres Seq. ID no. 13612038

SEQ ID NO: 114365 - protein, 1149 aa, Arabidopsis thaliana; identical to SEQ ID NO: 103126
  peptide (1)..(1149): Ceres Seq. ID no. 13612039

SEQ ID NO: 114366 - DNA, 1263 bp, Arabidopsis thaliana; identical to SEQ ID NO: 103127
  misc_feature (1)..(1263): Ceres Seq. ID no. 13612055
  misc_feature (1)..(1263): Ortholog of  Ceres SEQ ID NO 15178228 as cited in SEQ ID NO 58330
  misc_feature (1)..(1263): Ortholog of  Ceres SEQ ID NO 13596635 as cited in SEQ ID NO 62488

SEQ ID NO: 114367 - protein, 342 aa, Arabidopsis thaliana; identical to SEQ ID NO: 27640
  peptide (1)..(342): Ceres Seq. ID no. 13612056

SEQ ID NO: 114368 - protein, 336 aa, Arabidopsis thaliana; identical to SEQ ID NO: 27641
  peptide (1)..(336): Ceres Seq. ID no. 13612057

SEQ ID NO: 114369 - protein, 319 aa, Arabidopsis thaliana; identical to SEQ ID NO: 27642
  peptide (1)..(319): Ceres Seq. ID no. 13612058

SEQ ID NO: 114370 - DNA, 842 bp, Arabidopsis thaliana; identical to SEQ ID NO: 103131
  misc_feature (1)..(842): Ceres Seq. ID no. 13612066
  misc_feature (1)..(842): Ortholog of  Ceres SEQ ID NO 13599568 as cited in SEQ ID NO 509
  misc_feature (1)..(842): Ortholog of  Ceres SEQ ID NO 13638595 as cited in SEQ ID NO 52050
  misc_feature (1)..(842): Ortholog of  Ceres SEQ ID NO 13594748 as cited in SEQ ID NO 52114
  misc_feature (1)..(842): Ortholog of  Ceres SEQ ID NO 12623490 as cited in SEQ ID NO 61136
  misc_feature (1)..(842): Ortholog of  Ceres SEQ ID NO 12583993 as cited in SEQ ID NO 68098
  misc_feature (1)..(842): Ortholog of  Ceres SEQ ID NO 13654535 as cited in SEQ ID NO 68227

SEQ ID NO: 114371 - protein, 213 aa, Arabidopsis thaliana; identical to SEQ ID NO: 29517
  peptide (1)..(213): Ceres Seq. ID no. 13612067

SEQ ID NO: 114372 - protein, 200 aa, Arabidopsis thaliana; identical to SEQ ID NO: 29518
  peptide (1)..(200): Ceres Seq. ID no. 13612068

SEQ ID NO: 114373 - protein, 195 aa, Arabidopsis thaliana; identical to SEQ ID NO: 29519
  peptide (1)..(195): Ceres Seq. ID no. 13612069

SEQ ID NO: 114374 - DNA, 1190 bp, Arabidopsis thaliana; identical to SEQ ID NO: 103135
  misc_feature (1)..(1190): Ceres Seq. ID no. 13612077
  misc_feature (1)..(1190): Ortholog of  Ceres SEQ ID NO 14305963 as cited in SEQ ID NO 52290
  misc_feature (1)..(1190): Ortholog of  Ceres SEQ ID NO 14307492 as cited in SEQ ID NO 59504
  misc_feature (1)..(1190): Ortholog of  Ceres SEQ ID NO 13597255 as cited in SEQ ID NO 63874

SEQ ID NO: 114375 - protein, 222 aa, Arabidopsis thaliana; identical to SEQ ID NO: 103136
  peptide (1)..(222): Ceres Seq. ID no. 13612078

SEQ ID NO: 114376 - protein, 155 aa, Arabidopsis thaliana; identical to SEQ ID NO: 103137
  peptide (1)..(155): Ceres Seq. ID no. 13612079

SEQ ID NO: 114377 - protein, 137 aa, Arabidopsis thaliana; identical to SEQ ID NO: 26320
  peptide (1)..(137): Ceres Seq. ID no. 13612080

SEQ ID NO: 114378 - DNA, 1286 bp, Arabidopsis thaliana; identical to SEQ ID NO: 103139
  misc_feature (1)..(1286): Ceres Seq. ID no. 13612081
  misc_feature (1)..(1286): Ortholog of  Ceres SEQ ID NO 13582350 as cited in SEQ ID NO 56734
  misc_feature (1)..(1286): Ortholog of  Ceres SEQ ID NO 13598527 as cited in SEQ ID NO 64914

SEQ ID NO: 114379 - protein, 332 aa, Arabidopsis thaliana; identical to SEQ ID NO: 103140
  peptide (1)..(332): Ceres Seq. ID no. 13612082

SEQ ID NO: 114380 - protein, 308 aa, Arabidopsis thaliana; identical to SEQ ID NO: 103141
  peptide (1)..(308): Ceres Seq. ID no. 13612083

SEQ ID NO: 114381 - protein, 250 aa, Arabidopsis thaliana; identical to SEQ ID NO: 103142
  peptide (1)..(250): Ceres Seq. ID no. 13612084

SEQ ID NO: 114382 - DNA, 1473 bp, Arabidopsis thaliana; identical to SEQ ID NO: 103143
  misc_feature (1)..(1473): Ceres Seq. ID no. 13612088
  misc_feature (1)..(1473): Ortholog of  Ceres SEQ ID NO 15177012 as cited in SEQ ID NO 56256
  misc_feature (1)..(1473): Ortholog of  Ceres SEQ ID NO 13596509 as cited in SEQ ID NO 62004
  misc_feature (1)..(1473): Ortholog of  Ceres SEQ ID NO 13500385 as cited in SEQ ID NO 67583

SEQ ID NO: 114383 - protein, 362 aa, Arabidopsis thaliana; identical to SEQ ID NO: 103144
  peptide (1)..(362): Ceres Seq. ID no. 13612089

SEQ ID NO: 114384 - protein, 353 aa, Arabidopsis thaliana; identical to SEQ ID NO: 103145
  peptide (1)..(353): Ceres Seq. ID no. 13612090

SEQ ID NO: 114385 - protein, 346 aa, Arabidopsis thaliana; identical to SEQ ID NO: 103146
  peptide (1)..(346): Ceres Seq. ID no. 13612091

SEQ ID NO: 114386 - DNA, 1191 bp, Arabidopsis thaliana; identical to SEQ ID NO: 103147
  misc_feature (1)..(1191): Ceres Seq. ID no. 13612109
  misc_feature (1)..(1191): Ortholog of  Ceres SEQ ID NO 13587149 as cited in SEQ ID NO 0

SEQ ID NO: 114387 - protein, 295 aa, Arabidopsis thaliana; identical to SEQ ID NO: 103148
  peptide (1)..(295): Ceres Seq. ID no. 13612110

SEQ ID NO: 114388 - protein, 294 aa, Arabidopsis thaliana; identical to SEQ ID NO: 103149
  peptide (1)..(294): Ceres Seq. ID no. 13612111

SEQ ID NO: 114389 - protein, 276 aa, Arabidopsis thaliana; identical to SEQ ID NO: 103150
  peptide (1)..(276): Ceres Seq. ID no. 13612112

SEQ ID NO: 114390 - DNA, 852 bp, Arabidopsis thaliana; identical to SEQ ID NO: 103151
  misc_feature (1)..(852): Ceres Seq. ID no. 13612113
  misc_feature (1)..(852): Ortholog of  Ceres SEQ ID NO 13594465 as cited in SEQ ID NO 51233
  misc_feature (1)..(852): Ortholog of  Ceres SEQ ID NO 13585110 as cited in SEQ ID NO 60647

SEQ ID NO: 114391 - protein, 188 aa, Arabidopsis thaliana; identical to SEQ ID NO: 103152
  peptide (1)..(188): Ceres Seq. ID no. 13612114

SEQ ID NO: 114392 - protein, 140 aa, Arabidopsis thaliana; identical to SEQ ID NO: 103153
  peptide (1)..(140): Ceres Seq. ID no. 13612115

SEQ ID NO: 114393 - protein, 130 aa, Arabidopsis thaliana; identical to SEQ ID NO: 29556
  peptide (1)..(130): Ceres Seq. ID no. 13612116

SEQ ID NO: 114394 - DNA, 904 bp, Arabidopsis thaliana; identical to SEQ ID NO: 103155
  misc_feature (1)..(904): Ceres Seq. ID no. 13612117
  misc_feature (1)..(904): Ortholog of  Ceres SEQ ID NO 13662725 as cited in SEQ ID NO 64628

SEQ ID NO: 114395 - protein, 231 aa, Arabidopsis thaliana; identical to SEQ ID NO: 21948
  peptide (1)..(231): Ceres Seq. ID no. 13612118

SEQ ID NO: 114396 - protein, 220 aa, Arabidopsis thaliana; identical to SEQ ID NO: 21949
  peptide (1)..(220): Ceres Seq. ID no. 13612119

SEQ ID NO: 114397 - protein, 219 aa, Arabidopsis thaliana; identical to SEQ ID NO: 21950
  peptide (1)..(219): Ceres Seq. ID no. 13612120

SEQ ID NO: 114398 - DNA, 1416 bp, Arabidopsis thaliana; identical to SEQ ID NO: 103159
  misc_feature (1)..(1416): Ceres Seq. ID no. 13612121
  misc_feature (1)..(1416): Ortholog of  Ceres SEQ ID NO 12617323 as cited in SEQ ID NO 64129

SEQ ID NO: 114399 - protein, 373 aa, Arabidopsis thaliana; identical to SEQ ID NO: 103160
  peptide (1)..(373): Ceres Seq. ID no. 13612122

SEQ ID NO: 114400 - protein, 289 aa, Arabidopsis thaliana; identical to SEQ ID NO: 103161
  peptide (1)..(289): Ceres Seq. ID no. 13612123

SEQ ID NO: 114401 - protein, 209 aa, Arabidopsis thaliana; identical to SEQ ID NO: 103162
  peptide (1)..(209): Ceres Seq. ID no. 13612124

SEQ ID NO: 114402 - DNA, 1644 bp, Arabidopsis thaliana; identical to SEQ ID NO: 103163
  misc_feature (1)..(1644): Ceres Seq. ID no. 13612125
  misc_feature (1)..(1644): Ortholog of  Ceres SEQ ID NO 15176219 as cited in SEQ ID NO 58640
  misc_feature (1)..(1644): Ortholog of  Ceres SEQ ID NO 14303413 as cited in SEQ ID NO 59769

SEQ ID NO: 114403 - protein, 469 aa, Arabidopsis thaliana; identical to SEQ ID NO: 39627
  peptide (1)..(469): Ceres Seq. ID no. 13612126

SEQ ID NO: 114404 - protein, 463 aa, Arabidopsis thaliana; identical to SEQ ID NO: 39628
  peptide (1)..(463): Ceres Seq. ID no. 13612127

SEQ ID NO: 114405 - protein, 449 aa, Arabidopsis thaliana; identical to SEQ ID NO: 39629
  peptide (1)..(449): Ceres Seq. ID no. 13612128

SEQ ID NO: 114406 - DNA, 1162 bp, Arabidopsis thaliana; identical to SEQ ID NO: 103167
  misc_feature (1)..(1162): Ceres Seq. ID no. 13612129
  misc_feature (1)..(1162): Ortholog of  Ceres SEQ ID NO 15224319 as cited in SEQ ID NO 66044
  misc_feature (1)..(1162): Ortholog of  Ceres SEQ ID NO 13598045 as cited in SEQ ID NO 66822

SEQ ID NO: 114407 - protein, 250 aa, Arabidopsis thaliana; identical to SEQ ID NO: 23104
  peptide (1)..(250): Ceres Seq. ID no. 13612130

SEQ ID NO: 114408 - DNA, 926 bp, Arabidopsis thaliana; identical to SEQ ID NO: 103169
  misc_feature (1)..(926): Ceres Seq. ID no. 13612152
  misc_feature (1)..(926): Ortholog of  Ceres SEQ ID NO 15172991 as cited in SEQ ID NO 51333
  misc_feature (1)..(926): Ortholog of  Ceres SEQ ID NO 13594870 as cited in SEQ ID NO 51929
  misc_feature (1)..(926): Ortholog of  Ceres SEQ ID NO 12635481 as cited in SEQ ID NO 0

SEQ ID NO: 114409 - protein, 178 aa, Arabidopsis thaliana; identical to SEQ ID NO: 39493
  peptide (1)..(178): Ceres Seq. ID no. 13612153

SEQ ID NO: 114410 - DNA, 2421 bp, Arabidopsis thaliana; identical to SEQ ID NO: 103171
  misc_feature (1)..(2421): Ceres Seq. ID no. 13612154
  misc_feature (1)..(2421): Ortholog of  Ceres SEQ ID NO 15175681 as cited in SEQ ID NO 55458
  misc_feature (1)..(2421): Ortholog of  Ceres SEQ ID NO 15180188 as cited in SEQ ID NO 0

SEQ ID NO: 114411 - protein, 540 aa, Arabidopsis thaliana; identical to SEQ ID NO: 37383
  peptide (1)..(540): Ceres Seq. ID no. 13612155

SEQ ID NO: 114412 - protein, 515 aa, Arabidopsis thaliana; identical to SEQ ID NO: 37384
  peptide (1)..(515): Ceres Seq. ID no. 13612156

SEQ ID NO: 114413 - protein, 502 aa, Arabidopsis thaliana; identical to SEQ ID NO: 37385
  peptide (1)..(502): Ceres Seq. ID no. 13612157

SEQ ID NO: 114414 - DNA, 1451 bp, Arabidopsis thaliana; identical to SEQ ID NO: 103175
  misc_feature (1)..(1451): Ceres Seq. ID no. 13612158
  misc_feature (1)..(1451): Ortholog of  Ceres SEQ ID NO 13654989 as cited in SEQ ID NO 63117
  misc_feature (1)..(1451): Ortholog of  Ceres SEQ ID NO 13655640 as cited in SEQ ID NO 63844

SEQ ID NO: 114415 - protein, 362 aa, Arabidopsis thaliana; identical to SEQ ID NO: 43811
  peptide (1)..(362): Ceres Seq. ID no. 13612159

SEQ ID NO: 114416 - protein, 229 aa, Arabidopsis thaliana; identical to SEQ ID NO: 43812
  peptide (1)..(229): Ceres Seq. ID no. 13612160

SEQ ID NO: 114417 - DNA, 1557 bp, Arabidopsis thaliana; identical to SEQ ID NO: 103178
  misc_feature (1)..(1557): Ceres Seq. ID no. 13612169
  misc_feature (1)..(1557): Ortholog of  Ceres SEQ ID NO 14313155 as cited in SEQ ID NO 54706
  misc_feature (1)..(1557): Ortholog of  Ceres SEQ ID NO 13639022 as cited in SEQ ID NO 59811

SEQ ID NO: 114418 - protein, 386 aa, Arabidopsis thaliana; identical to SEQ ID NO: 30033
  peptide (1)..(386): Ceres Seq. ID no. 13612170

SEQ ID NO: 114419 - protein, 382 aa, Arabidopsis thaliana; identical to SEQ ID NO: 30034
  peptide (1)..(382): Ceres Seq. ID no. 13612171

SEQ ID NO: 114420 - protein, 348 aa, Arabidopsis thaliana; identical to SEQ ID NO: 30035
  peptide (1)..(348): Ceres Seq. ID no. 13612172

SEQ ID NO: 114421 - DNA, 1862 bp, Arabidopsis thaliana; identical to SEQ ID NO: 103182
  misc_feature (1)..(1862): Ceres Seq. ID no. 13612173
  misc_feature (1)..(1862): Ortholog of  Ceres SEQ ID NO 15174547 as cited in SEQ ID NO 59586
  misc_feature (1)..(1862): Ortholog of  Ceres SEQ ID NO 15169470 as cited in SEQ ID NO 66036

SEQ ID NO: 114422 - protein, 527 aa, Arabidopsis thaliana; identical to SEQ ID NO: 22234
  peptide (1)..(527): Ceres Seq. ID no. 13612174

SEQ ID NO: 114423 - protein, 524 aa, Arabidopsis thaliana; identical to SEQ ID NO: 22235
  peptide (1)..(524): Ceres Seq. ID no. 13612175

SEQ ID NO: 114424 - protein, 520 aa, Arabidopsis thaliana; identical to SEQ ID NO: 22236
  peptide (1)..(520): Ceres Seq. ID no. 13612176

SEQ ID NO: 114425 - DNA, 1479 bp, Arabidopsis thaliana; identical to SEQ ID NO: 103186
  misc_feature (1)..(1479): Ceres Seq. ID no. 13612177
  misc_feature (1)..(1479): Ortholog of  Ceres SEQ ID NO 13596581 as cited in SEQ ID NO 62420
  misc_feature (1)..(1479): Ortholog of  Ceres SEQ ID NO 13591273 as cited in SEQ ID NO 65904
  misc_feature (1)..(1479): Ortholog of  Ceres SEQ ID NO 13623086 as cited in SEQ ID NO 0

SEQ ID NO: 114426 - protein, 413 aa, Arabidopsis thaliana; identical to SEQ ID NO: 25700
  peptide (1)..(413): Ceres Seq. ID no. 13612178

SEQ ID NO: 114427 - protein, 388 aa, Arabidopsis thaliana; identical to SEQ ID NO: 25701
  peptide (1)..(388): Ceres Seq. ID no. 13612179

SEQ ID NO: 114428 - protein, 253 aa, Arabidopsis thaliana; identical to SEQ ID NO: 25702
  peptide (1)..(253): Ceres Seq. ID no. 13612180

SEQ ID NO: 114429 - DNA, 1215 bp, Arabidopsis thaliana; identical to SEQ ID NO: 103190
  misc_feature (1)..(1215): Ceres Seq. ID no. 13612181
  misc_feature (1)..(1215): Ortholog of  Ceres SEQ ID NO 13597019 as cited in SEQ ID NO 64303
  misc_feature (1)..(1215): Ortholog of  Ceres SEQ ID NO 13654191 as cited in SEQ ID NO 68235
  misc_feature (1)..(1215): Ortholog of  Ceres SEQ ID NO 15179513 as cited in SEQ ID NO 0

SEQ ID NO: 114430 - protein, 304 aa, Arabidopsis thaliana; identical to SEQ ID NO: 26945
  peptide (1)..(304): Ceres Seq. ID no. 13612182

SEQ ID NO: 114431 - protein, 282 aa, Arabidopsis thaliana; identical to SEQ ID NO: 26946
  peptide (1)..(282): Ceres Seq. ID no. 13612183

SEQ ID NO: 114432 - protein, 190 aa, Arabidopsis thaliana; identical to SEQ ID NO: 26947
  peptide (1)..(190): Ceres Seq. ID no. 13612184

SEQ ID NO: 114433 - DNA, 815 bp, Arabidopsis thaliana; identical to SEQ ID NO: 103194
  misc_feature (1)..(815): Ceres Seq. ID no. 13612185
  misc_feature (1)..(815): Ortholog of  Ceres SEQ ID NO 13594418 as cited in SEQ ID NO 60153

SEQ ID NO: 114434 - protein, 185 aa, Arabidopsis thaliana; identical to SEQ ID NO: 103195
  peptide (1)..(185): Ceres Seq. ID no. 13612186

SEQ ID NO: 114435 - protein, 151 aa, Arabidopsis thaliana; identical to SEQ ID NO: 26156
  peptide (1)..(151): Ceres Seq. ID no. 13612187

SEQ ID NO: 114436 - DNA, 1767 bp, Arabidopsis thaliana; identical to SEQ ID NO: 103197
  misc_feature (1)..(1767): Ceres Seq. ID no. 13612188
  misc_feature (1)..(1767): Ortholog of  Ceres SEQ ID NO 12623695 as cited in SEQ ID NO 61286

SEQ ID NO: 114437 - protein, 534 aa, Arabidopsis thaliana; identical to SEQ ID NO: 103198
  peptide (1)..(534): Ceres Seq. ID no. 13612189

SEQ ID NO: 114438 - protein, 494 aa, Arabidopsis thaliana; identical to SEQ ID NO: 103199
  peptide (1)..(494): Ceres Seq. ID no. 13612190

SEQ ID NO: 114439 - protein, 466 aa, Arabidopsis thaliana; identical to SEQ ID NO: 103200
  peptide (1)..(466): Ceres Seq. ID no. 13612191

SEQ ID NO: 114440 - DNA, 1131 bp, Arabidopsis thaliana; identical to SEQ ID NO: 103201
  misc_feature (1)..(1131): Ceres Seq. ID no. 13612192
  misc_feature (1)..(1131): Ortholog of  Ceres SEQ ID NO 14315662 as cited in SEQ ID NO 53109
  misc_feature (1)..(1131): Ortholog of  Ceres SEQ ID NO 12620168 as cited in SEQ ID NO 66161

SEQ ID NO: 114441 - protein, 323 aa, Arabidopsis thaliana; identical to SEQ ID NO: 103202
  peptide (1)..(323): Ceres Seq. ID no. 13612193

SEQ ID NO: 114442 - protein, 301 aa, Arabidopsis thaliana; identical to SEQ ID NO: 103203
  peptide (1)..(301): Ceres Seq. ID no. 13612194

SEQ ID NO: 114443 - protein, 296 aa, Arabidopsis thaliana; identical to SEQ ID NO: 103204
  peptide (1)..(296): Ceres Seq. ID no. 13612195

SEQ ID NO: 114444 - DNA, 1366 bp, Arabidopsis thaliana; identical to SEQ ID NO: 103205
  misc_feature (1)..(1366): Ceres Seq. ID no. 13612200
  misc_feature (1)..(1366): Ortholog of  Ceres SEQ ID NO 12616843 as cited in SEQ ID NO 68992

SEQ ID NO: 114445 - protein, 376 aa, Arabidopsis thaliana; identical to SEQ ID NO: 103206
  peptide (1)..(376): Ceres Seq. ID no. 13612201

SEQ ID NO: 114446 - protein, 355 aa, Arabidopsis thaliana; identical to SEQ ID NO: 103207
  peptide (1)..(355): Ceres Seq. ID no. 13612202

SEQ ID NO: 114447 - protein, 230 aa, Arabidopsis thaliana; identical to SEQ ID NO: 103208
  peptide (1)..(230): Ceres Seq. ID no. 13612203

SEQ ID NO: 114448 - DNA, 563 bp, Arabidopsis thaliana; identical to SEQ ID NO: 103209
  misc_feature (1)..(563): Ceres Seq. ID no. 13612234
  misc_feature (1)..(563): Ortholog of  Ceres SEQ ID NO 14315076 as cited in SEQ ID NO 57157

SEQ ID NO: 114449 - protein, 142 aa, Arabidopsis thaliana; identical to SEQ ID NO: 103210
  peptide (1)..(142): Ceres Seq. ID no. 13612235

SEQ ID NO: 114450 - protein, 141 aa, Arabidopsis thaliana; identical to SEQ ID NO: 42344
  peptide (1)..(141): Ceres Seq. ID no. 13612236

SEQ ID NO: 114451 - DNA, 817 bp, Arabidopsis thaliana; identical to SEQ ID NO: 103212
  misc_feature (1)..(817): Ceres Seq. ID no. 13612237
  misc_feature (1)..(817): Ortholog of  Ceres SEQ ID NO 13647991 as cited in SEQ ID NO 187

SEQ ID NO: 114452 - protein, 219 aa, Arabidopsis thaliana; identical to SEQ ID NO: 103213
  peptide (1)..(219): Ceres Seq. ID no. 13612238

SEQ ID NO: 114453 - protein, 205 aa, Arabidopsis thaliana; identical to SEQ ID NO: 103214
  peptide (1)..(205): Ceres Seq. ID no. 13612239

SEQ ID NO: 114454 - DNA, 781 bp, Arabidopsis thaliana; identical to SEQ ID NO: 103215
  misc_feature (1)..(781): Ceres Seq. ID no. 13612240
  misc_feature (1)..(781): Ortholog of  Ceres SEQ ID NO 13661969 as cited in SEQ ID NO 61215
  misc_feature (1)..(781): Ortholog of  Ceres SEQ ID NO 12614809 as cited in SEQ ID NO 68808
  misc_feature (1)..(781): Ortholog of  Ceres SEQ ID NO 12634366 as cited in SEQ ID NO 0
  misc_feature (1)..(781): Ortholog of  Ceres SEQ ID NO 14309113 as cited in SEQ ID NO 0
  misc_feature (1)..(781): Ortholog of  Ceres SEQ ID NO 15175257 as cited in SEQ ID NO 0

SEQ ID NO: 114455 - protein, 184 aa, Arabidopsis thaliana; identical to SEQ ID NO: 30098
  peptide (1)..(184): Ceres Seq. ID no. 13612241

SEQ ID NO: 114456 - protein, 138 aa, Arabidopsis thaliana; identical to SEQ ID NO: 30099
  peptide (1)..(138): Ceres Seq. ID no. 13612242

SEQ ID NO: 114457 - protein, 111 aa, Arabidopsis thaliana; identical to SEQ ID NO: 30100
  peptide (1)..(111): Ceres Seq. ID no. 13612243

SEQ ID NO: 114458 - DNA, 770 bp, Arabidopsis thaliana; identical to SEQ ID NO: 103219
  misc_feature (1)..(770): Ceres Seq. ID no. 13612244
  misc_feature (1)..(770): Ortholog of  Ceres SEQ ID NO 15170072 as cited in SEQ ID NO 55533
  misc_feature (1)..(770): Ortholog of  Ceres SEQ ID NO 15173959 as cited in SEQ ID NO 63398
  misc_feature (1)..(770): Ortholog of  Ceres SEQ ID NO 13663564 as cited in SEQ ID NO 66903

SEQ ID NO: 114459 - protein, 158 aa, Arabidopsis thaliana; identical to SEQ ID NO: 25849
  peptide (1)..(158): Ceres Seq. ID no. 13612245

SEQ ID NO: 114460 - protein, 123 aa, Arabidopsis thaliana; identical to SEQ ID NO: 25850
  peptide (1)..(123): Ceres Seq. ID no. 13612246

SEQ ID NO: 114461 - protein, 115 aa, Arabidopsis thaliana; identical to SEQ ID NO: 25851
  peptide (1)..(115): Ceres Seq. ID no. 13612247

SEQ ID NO: 114462 - DNA, 1094 bp, Arabidopsis thaliana; identical to SEQ ID NO: 103223
  misc_feature (1)..(1094): Ceres Seq. ID no. 13612256
  misc_feature (1)..(1094): Ortholog of  Ceres SEQ ID NO 15169419 as cited in SEQ ID NO 58491
  misc_feature (1)..(1094): Ortholog of  Ceres SEQ ID NO 15179026 as cited in SEQ ID NO 0

SEQ ID NO: 114463 - protein, 315 aa, Arabidopsis thaliana; identical to SEQ ID NO: 103224
  peptide (1)..(315): Ceres Seq. ID no. 13612257

SEQ ID NO: 114464 - protein, 263 aa, Arabidopsis thaliana; identical to SEQ ID NO: 103225
  peptide (1)..(263): Ceres Seq. ID no. 13612258

SEQ ID NO: 114465 - protein, 221 aa, Arabidopsis thaliana; identical to SEQ ID NO: 103226
  peptide (1)..(221): Ceres Seq. ID no. 13612259

SEQ ID NO: 114466 - DNA, 1303 bp, Arabidopsis thaliana; identical to SEQ ID NO: 103227
  misc_feature (1)..(1303): Ceres Seq. ID no. 13612260
  misc_feature (1)..(1303): Ortholog of  Ceres SEQ ID NO 15169419 as cited in SEQ ID NO 58491

SEQ ID NO: 114467 - protein, 332 aa, Arabidopsis thaliana; identical to SEQ ID NO: 36239
  peptide (1)..(332): Ceres Seq. ID no. 13612261

SEQ ID NO: 114468 - protein, 299 aa, Arabidopsis thaliana; identical to SEQ ID NO: 36240
  peptide (1)..(299): Ceres Seq. ID no. 13612262

SEQ ID NO: 114469 - DNA, 858 bp, Arabidopsis thaliana; identical to SEQ ID NO: 103230
  misc_feature (1)..(858): Ceres Seq. ID no. 13612276
  misc_feature (1)..(858): Ortholog of  Ceres SEQ ID NO 13595658 as cited in SEQ ID NO 59888
  misc_feature (1)..(858): Ortholog of  Ceres SEQ ID NO 13661330 as cited in SEQ ID NO 61614
  misc_feature (1)..(858): Ortholog of  Ceres SEQ ID NO 13596025 as cited in SEQ ID NO 62024
  misc_feature (1)..(858): Ortholog of  Ceres SEQ ID NO 13662324 as cited in SEQ ID NO 62162
  misc_feature (1)..(858): Ortholog of  Ceres SEQ ID NO 12625713 as cited in SEQ ID NO 64160
  misc_feature (1)..(858): Ortholog of  Ceres SEQ ID NO 14301782 as cited in SEQ ID NO 66788
  misc_feature (1)..(858): Ortholog of  Ceres SEQ ID NO 14302860 as cited in SEQ ID NO 67667
  misc_feature (1)..(858): Ortholog of  Ceres SEQ ID NO 15174373 as cited in SEQ ID NO 0

SEQ ID NO: 114470 - protein, 262 aa, Arabidopsis thaliana; identical to SEQ ID NO: 103231
  peptide (1)..(262): Ceres Seq. ID no. 13612277

SEQ ID NO: 114471 - protein, 247 aa, Arabidopsis thaliana; identical to SEQ ID NO: 103232
  peptide (1)..(247): Ceres Seq. ID no. 13612278

SEQ ID NO: 114472 - DNA, 692 bp, Arabidopsis thaliana; identical to SEQ ID NO: 103233
  misc_feature (1)..(692): Ceres Seq. ID no. 13612286
  misc_feature (1)..(692): Ortholog of  Ceres SEQ ID NO 15175146 as cited in SEQ ID NO 0

SEQ ID NO: 114473 - protein, 129 aa, Arabidopsis thaliana; identical to SEQ ID NO: 30885
  peptide (1)..(129): Ceres Seq. ID no. 13612287

SEQ ID NO: 114474 - DNA, 1484 bp, Arabidopsis thaliana; identical to SEQ ID NO: 103235
  misc_feature (1)..(1484): Ceres Seq. ID no. 13612292
  misc_feature (1)..(1484): Ortholog of  Ceres SEQ ID NO 12609528 as cited in SEQ ID NO 51902
  misc_feature (1)..(1484): Ortholog of  Ceres SEQ ID NO 12625248 as cited in SEQ ID NO 68797

SEQ ID NO: 114475 - protein, 299 aa, Arabidopsis thaliana; identical to SEQ ID NO: 35840
  peptide (1)..(299): Ceres Seq. ID no. 13612293

SEQ ID NO: 114476 - DNA, 1049 bp, Arabidopsis thaliana; identical to SEQ ID NO: 103237
  misc_feature (1)..(1049): Ceres Seq. ID no. 13612294
  misc_feature (1)..(1049): Ortholog of  Ceres SEQ ID NO 15172842 as cited in SEQ ID NO 58023

SEQ ID NO: 114477 - protein, 184 aa, Arabidopsis thaliana; identical to SEQ ID NO: 23240
  peptide (1)..(184): Ceres Seq. ID no. 13612295

SEQ ID NO: 114478 - protein, 165 aa, Arabidopsis thaliana; identical to SEQ ID NO: 23241
  peptide (1)..(165): Ceres Seq. ID no. 13612296

SEQ ID NO: 114479 - protein, 137 aa, Arabidopsis thaliana; identical to SEQ ID NO: 23242
  peptide (1)..(137): Ceres Seq. ID no. 13612297

SEQ ID NO: 114480 - DNA, 1310 bp, Arabidopsis thaliana; identical to SEQ ID NO: 103241
  misc_feature (1)..(1310): Ceres Seq. ID no. 13612298
  misc_feature (1)..(1310): Ortholog of  Ceres SEQ ID NO 15170461 as cited in SEQ ID NO 52853
  misc_feature (1)..(1310): Ortholog of  Ceres SEQ ID NO 13595351 as cited in SEQ ID NO 55934
  misc_feature (1)..(1310): Ortholog of  Ceres SEQ ID NO 13639645 as cited in SEQ ID NO 57488

SEQ ID NO: 114481 - protein, 387 aa, Arabidopsis thaliana; identical to SEQ ID NO: 103242
  peptide (1)..(387): Ceres Seq. ID no. 13612299

SEQ ID NO: 114482 - protein, 365 aa, Arabidopsis thaliana; identical to SEQ ID NO: 103243
  peptide (1)..(365): Ceres Seq. ID no. 13612300

SEQ ID NO: 114483 - protein, 361 aa, Arabidopsis thaliana; identical to SEQ ID NO: 103244
  peptide (1)..(361): Ceres Seq. ID no. 13612301

SEQ ID NO: 114484 - DNA, 1627 bp, Arabidopsis thaliana; identical to SEQ ID NO: 103245
  misc_feature (1)..(1627): Ceres Seq. ID no. 13612306
  misc_feature (1)..(1627): Ortholog of  Ceres SEQ ID NO 13594128 as cited in SEQ ID NO 58608
  misc_feature (1)..(1627): Ortholog of  Ceres SEQ ID NO 14309682 as cited in SEQ ID NO 58908
  misc_feature (1)..(1627): Ortholog of  Ceres SEQ ID NO 15176122 as cited in SEQ ID NO 62462
  misc_feature (1)..(1627): Ortholog of  Ceres SEQ ID NO 12624849 as cited in SEQ ID NO 62773

SEQ ID NO: 114485 - protein, 468 aa, Arabidopsis thaliana; identical to SEQ ID NO: 103246
  peptide (1)..(468): Ceres Seq. ID no. 13612307

SEQ ID NO: 114486 - protein, 428 aa, Arabidopsis thaliana; identical to SEQ ID NO: 36448
  peptide (1)..(428): Ceres Seq. ID no. 13612308

SEQ ID NO: 114487 - protein, 338 aa, Arabidopsis thaliana; identical to SEQ ID NO: 24106
  peptide (1)..(338): Ceres Seq. ID no. 13612309

SEQ ID NO: 114488 - DNA, 982 bp, Arabidopsis thaliana; identical to SEQ ID NO: 103249
  misc_feature (1)..(982): Ceres Seq. ID no. 13612316
  misc_feature (1)..(982): Ortholog of  Ceres SEQ ID NO 14305022 as cited in SEQ ID NO 53586
  misc_feature (1)..(982): Ortholog of  Ceres SEQ ID NO 12506279 as cited in SEQ ID NO 55440
  misc_feature (1)..(982): Ortholog of  Ceres SEQ ID NO 13654847 as cited in SEQ ID NO 62459
  misc_feature (1)..(982): Ortholog of  Ceres SEQ ID NO 15174357 as cited in SEQ ID NO 0

SEQ ID NO: 114489 - protein, 274 aa, Arabidopsis thaliana; identical to SEQ ID NO: 103250
  peptide (1)..(274): Ceres Seq. ID no. 13612317

SEQ ID NO: 114490 - protein, 260 aa, Arabidopsis thaliana; identical to SEQ ID NO: 103251
  peptide (1)..(260): Ceres Seq. ID no. 13612318

SEQ ID NO: 114491 - protein, 211 aa, Arabidopsis thaliana; identical to SEQ ID NO: 103252
  peptide (1)..(211): Ceres Seq. ID no. 13612319

SEQ ID NO: 114492 - DNA, 678 bp, Arabidopsis thaliana; identical to SEQ ID NO: 103253
  misc_feature (1)..(678): Ceres Seq. ID no. 13612328
  misc_feature (1)..(678): Ortholog of  Ceres SEQ ID NO 13594766 as cited in SEQ ID NO 51913
  misc_feature (1)..(678): Ortholog of  Ceres SEQ ID NO 12609226 as cited in SEQ ID NO 59300
  misc_feature (1)..(678): Ortholog of  Ceres SEQ ID NO 13654942 as cited in SEQ ID NO 62533
  misc_feature (1)..(678): Ortholog of  Ceres SEQ ID NO 13599195 as cited in SEQ ID NO 0

SEQ ID NO: 114493 - protein, 151 aa, Arabidopsis thaliana; identical to SEQ ID NO: 23597
  peptide (1)..(151): Ceres Seq. ID no. 13612329

SEQ ID NO: 114494 - DNA, 1105 bp, Arabidopsis thaliana; identical to SEQ ID NO: 103255
  misc_feature (1)..(1105): Ceres Seq. ID no. 13612330
  misc_feature (1)..(1105): Ortholog of  Ceres SEQ ID NO 13654802 as cited in SEQ ID NO 62664

SEQ ID NO: 114495 - protein, 263 aa, Arabidopsis thaliana; identical to SEQ ID NO: 103256
  peptide (1)..(263): Ceres Seq. ID no. 13612331

SEQ ID NO: 114496 - protein, 224 aa, Arabidopsis thaliana; identical to SEQ ID NO: 77543
  peptide (1)..(224): Ceres Seq. ID no. 13612332

SEQ ID NO: 114497 - protein, 159 aa, Arabidopsis thaliana; identical to SEQ ID NO: 77544
  peptide (1)..(159): Ceres Seq. ID no. 13612333

SEQ ID NO: 114498 - DNA, 840 bp, Arabidopsis thaliana; identical to SEQ ID NO: 103259
  misc_feature (1)..(840): Ceres Seq. ID no. 13612334
  misc_feature (1)..(840): Ortholog of  Ceres SEQ ID NO 13495070 as cited in SEQ ID NO 53216
  misc_feature (1)..(840): Ortholog of  Ceres SEQ ID NO 12598241 as cited in SEQ ID NO 61025
  misc_feature (1)..(840): Ortholog of  Ceres SEQ ID NO 13661333 as cited in SEQ ID NO 61620
  misc_feature (1)..(840): Ortholog of  Ceres SEQ ID NO 15173749 as cited in SEQ ID NO 61775
  misc_feature (1)..(840): Ortholog of  Ceres SEQ ID NO 13596812 as cited in SEQ ID NO 62283
  misc_feature (1)..(840): Ortholog of  Ceres SEQ ID NO 13623021 as cited in SEQ ID NO 0
  misc_feature (1)..(840): Ortholog of  Ceres SEQ ID NO 14309080 as cited in SEQ ID NO 0

SEQ ID NO: 114499 - protein, 139 aa, Arabidopsis thaliana; identical to SEQ ID NO: 28739
  peptide (1)..(139): Ceres Seq. ID no. 13612335

SEQ ID NO: 114500 - protein, 132 aa, Arabidopsis thaliana; identical to SEQ ID NO: 28740
  peptide (1)..(132): Ceres Seq. ID no. 13612336

SEQ ID NO: 114501 - DNA, 696 bp, Arabidopsis thaliana; identical to SEQ ID NO: 103262
  misc_feature (1)..(696): Ceres Seq. ID no. 13612345
  misc_feature (1)..(696): Ortholog of  Ceres SEQ ID NO 13594705 as cited in SEQ ID NO 52034

SEQ ID NO: 114502 - protein, 167 aa, Arabidopsis thaliana; identical to SEQ ID NO: 103263
  peptide (1)..(167): Ceres Seq. ID no. 13612346

SEQ ID NO: 114503 - DNA, 1453 bp, Arabidopsis thaliana; identical to SEQ ID NO: 103264
  misc_feature (1)..(1453): Ceres Seq. ID no. 13612347
  misc_feature (1)..(1453): Ortholog of  Ceres SEQ ID NO 13664362 as cited in SEQ ID NO 66523

SEQ ID NO: 114504 - protein, 400 aa, Arabidopsis thaliana; identical to SEQ ID NO: 103265
  peptide (1)..(400): Ceres Seq. ID no. 13612348

SEQ ID NO: 114505 - protein, 378 aa, Arabidopsis thaliana; identical to SEQ ID NO: 25905
  peptide (1)..(378): Ceres Seq. ID no. 13612349

SEQ ID NO: 114506 - protein, 269 aa, Arabidopsis thaliana; identical to SEQ ID NO: 25906
  peptide (1)..(269): Ceres Seq. ID no. 13612350

SEQ ID NO: 114507 - DNA, 1390 bp, Arabidopsis thaliana; identical to SEQ ID NO: 103268
  misc_feature (1)..(1390): Ceres Seq. ID no. 13612369
  misc_feature (1)..(1390): Ortholog of  Ceres SEQ ID NO 13581579 as cited in SEQ ID NO 58361
  misc_feature (1)..(1390): Ortholog of  Ceres SEQ ID NO 13596474 as cited in SEQ ID NO 62169
  misc_feature (1)..(1390): Ortholog of  Ceres SEQ ID NO 13598714 as cited in SEQ ID NO 62656
  misc_feature (1)..(1390): Ortholog of  Ceres SEQ ID NO 13596969 as cited in SEQ ID NO 63375
  misc_feature (1)..(1390): Ortholog of  Ceres SEQ ID NO 13597519 as cited in SEQ ID NO 64759
  misc_feature (1)..(1390): Ortholog of  Ceres SEQ ID NO 13597870 as cited in SEQ ID NO 64982
  misc_feature (1)..(1390): Ortholog of  Ceres SEQ ID NO 13595926 as cited in SEQ ID NO 67778
  misc_feature (1)..(1390): Ortholog of  Ceres SEQ ID NO 13596362 as cited in SEQ ID NO 67877
  misc_feature (1)..(1390): Ortholog of  Ceres SEQ ID NO 12567001 as cited in SEQ ID NO 0

SEQ ID NO: 114508 - protein, 334 aa, Arabidopsis thaliana; identical to SEQ ID NO: 37496
  peptide (1)..(334): Ceres Seq. ID no. 13612370

SEQ ID NO: 114509 - protein, 331 aa, Arabidopsis thaliana; identical to SEQ ID NO: 37497
  peptide (1)..(331): Ceres Seq. ID no. 13612371

SEQ ID NO: 114510 - protein, 192 aa, Arabidopsis thaliana; identical to SEQ ID NO: 37498
  peptide (1)..(192): Ceres Seq. ID no. 13612372

SEQ ID NO: 114511 - DNA, 965 bp, Arabidopsis thaliana; identical to SEQ ID NO: 103272
  misc_feature (1)..(965): Ceres Seq. ID no. 13612373
  misc_feature (1)..(965): Ortholog of  Ceres SEQ ID NO 14306062 as cited in SEQ ID NO 57524

SEQ ID NO: 114512 - protein, 177 aa, Arabidopsis thaliana; identical to SEQ ID NO: 103273
  peptide (1)..(177): Ceres Seq. ID no. 13612374

SEQ ID NO: 114513 - protein, 152 aa, Arabidopsis thaliana; identical to SEQ ID NO: 103274
  peptide (1)..(152): Ceres Seq. ID no. 13612375

SEQ ID NO: 114514 - DNA, 1083 bp, Arabidopsis thaliana; identical to SEQ ID NO: 103275
  misc_feature (1)..(1083): Ceres Seq. ID no. 13612376
  misc_feature (1)..(1083): Ortholog of  Ceres SEQ ID NO 14312777 as cited in SEQ ID NO 55573
  misc_feature (1)..(1083): Ortholog of  Ceres SEQ ID NO 13595190 as cited in SEQ ID NO 55916
  misc_feature (1)..(1083): Ortholog of  Ceres SEQ ID NO 14302004 as cited in SEQ ID NO 63437
  misc_feature (1)..(1083): Ortholog of  Ceres SEQ ID NO 13599456 as cited in SEQ ID NO 0

SEQ ID NO: 114515 - protein, 263 aa, Arabidopsis thaliana; identical to SEQ ID NO: 23440
  peptide (1)..(263): Ceres Seq. ID no. 13612377

SEQ ID NO: 114516 - protein, 247 aa, Arabidopsis thaliana; identical to SEQ ID NO: 23441
  peptide (1)..(247): Ceres Seq. ID no. 13612378

SEQ ID NO: 114517 - protein, 173 aa, Arabidopsis thaliana; identical to SEQ ID NO: 23442
  peptide (1)..(173): Ceres Seq. ID no. 13612379

SEQ ID NO: 114518 - DNA, 962 bp, Arabidopsis thaliana; identical to SEQ ID NO: 103279
  misc_feature (1)..(962): Ceres Seq. ID no. 13612380
  misc_feature (1)..(962): Ortholog of  Ceres SEQ ID NO 14302764 as cited in SEQ ID NO 67753
  misc_feature (1)..(962): Ortholog of  Ceres SEQ ID NO 14302291 as cited in SEQ ID NO 68180

SEQ ID NO: 114519 - protein, 243 aa, Arabidopsis thaliana; identical to SEQ ID NO: 26540
  peptide (1)..(243): Ceres Seq. ID no. 13612381

SEQ ID NO: 114520 - protein, 186 aa, Arabidopsis thaliana; identical to SEQ ID NO: 26541
  peptide (1)..(186): Ceres Seq. ID no. 13612382

SEQ ID NO: 114521 - protein, 147 aa, Arabidopsis thaliana; identical to SEQ ID NO: 26542
  peptide (1)..(147): Ceres Seq. ID no. 13612383

SEQ ID NO: 114522 - DNA, 1208 bp, Arabidopsis thaliana; identical to SEQ ID NO: 103283
  misc_feature (1)..(1208): Ceres Seq. ID no. 13612392
  misc_feature (1)..(1208): Ortholog of  Ceres SEQ ID NO 12619999 as cited in SEQ ID NO 66123
  misc_feature (1)..(1208): Ortholog of  Ceres SEQ ID NO 13656436 as cited in SEQ ID NO 69154

SEQ ID NO: 114523 - protein, 221 aa, Arabidopsis thaliana; identical to SEQ ID NO: 103284
  peptide (1)..(221): Ceres Seq. ID no. 13612393

SEQ ID NO: 114524 - protein, 166 aa, Arabidopsis thaliana; identical to SEQ ID NO: 103285
  peptide (1)..(166): Ceres Seq. ID no. 13612394

SEQ ID NO: 114525 - DNA, 1645 bp, Arabidopsis thaliana; identical to SEQ ID NO: 103286
  misc_feature (1)..(1645): Ceres Seq. ID no. 13612425
  misc_feature (1)..(1645): Ortholog of  Ceres SEQ ID NO 13597334 as cited in SEQ ID NO 64244

SEQ ID NO: 114526 - protein, 373 aa, Arabidopsis thaliana; identical to SEQ ID NO: 40819
  peptide (1)..(373): Ceres Seq. ID no. 13612426

SEQ ID NO: 114527 - protein, 367 aa, Arabidopsis thaliana; identical to SEQ ID NO: 40820
  peptide (1)..(367): Ceres Seq. ID no. 13612427

SEQ ID NO: 114528 - protein, 312 aa, Arabidopsis thaliana; identical to SEQ ID NO: 40821
  peptide (1)..(312): Ceres Seq. ID no. 13612428

SEQ ID NO: 114529 - DNA, 1303 bp, Arabidopsis thaliana; identical to SEQ ID NO: 103290
  misc_feature (1)..(1303): Ceres Seq. ID no. 13612429
  misc_feature (1)..(1303): Ortholog of  Ceres SEQ ID NO 13648081 as cited in SEQ ID NO 165
  misc_feature (1)..(1303): Ortholog of  Ceres SEQ ID NO 15224803 as cited in SEQ ID NO 56572
  misc_feature (1)..(1303): Ortholog of  Ceres SEQ ID NO 13502952 as cited in SEQ ID NO 62271
  misc_feature (1)..(1303): Ortholog of  Ceres SEQ ID NO 13502973 as cited in SEQ ID NO 68052
  misc_feature (1)..(1303): Ortholog of  Ceres SEQ ID NO 13596000 as cited in SEQ ID NO 68188

SEQ ID NO: 114530 - protein, 371 aa, Arabidopsis thaliana; identical to SEQ ID NO: 103291
  peptide (1)..(371): Ceres Seq. ID no. 13612430

SEQ ID NO: 114531 - protein, 364 aa, Arabidopsis thaliana; identical to SEQ ID NO: 42787
  peptide (1)..(364): Ceres Seq. ID no. 13612431

SEQ ID NO: 114532 - protein, 258 aa, Arabidopsis thaliana; identical to SEQ ID NO: 42788
  peptide (1)..(258): Ceres Seq. ID no. 13612432

SEQ ID NO: 114533 - DNA, 1089 bp, Arabidopsis thaliana; identical to SEQ ID NO: 103294
  misc_feature (1)..(1089): Ceres Seq. ID no. 13612439
  misc_feature (1)..(1089): Ortholog of  Ceres SEQ ID NO 14314775 as cited in SEQ ID NO 56844
  misc_feature (1)..(1089): Ortholog of  Ceres SEQ ID NO 14314628 as cited in SEQ ID NO 56888

SEQ ID NO: 114534 - protein, 294 aa, Arabidopsis thaliana; identical to SEQ ID NO: 103295
  peptide (1)..(294): Ceres Seq. ID no. 13612440

SEQ ID NO: 114535 - protein, 267 aa, Arabidopsis thaliana; identical to SEQ ID NO: 103296
  peptide (1)..(267): Ceres Seq. ID no. 13612441

SEQ ID NO: 114536 - protein, 158 aa, Arabidopsis thaliana; identical to SEQ ID NO: 41862
  peptide (1)..(158): Ceres Seq. ID no. 13612442

SEQ ID NO: 114537 - DNA, 1573 bp, Arabidopsis thaliana; identical to SEQ ID NO: 103298
  misc_feature (1)..(1573): Ceres Seq. ID no. 13612443
  misc_feature (1)..(1573): Ortholog of  Ceres SEQ ID NO 14301471 as cited in SEQ ID NO 68064
  misc_feature (1)..(1573): Ortholog of  Ceres SEQ ID NO 13574418 as cited in SEQ ID NO 0
  misc_feature (1)..(1573): Ortholog of  Ceres SEQ ID NO 13600272 as cited in SEQ ID NO 0

SEQ ID NO: 114538 - protein, 424 aa, Arabidopsis thaliana; identical to SEQ ID NO: 103299
  peptide (1)..(424): Ceres Seq. ID no. 13612444

SEQ ID NO: 114539 - protein, 415 aa, Arabidopsis thaliana; identical to SEQ ID NO: 103300
  peptide (1)..(415): Ceres Seq. ID no. 13612445

SEQ ID NO: 114540 - protein, 395 aa, Arabidopsis thaliana; identical to SEQ ID NO: 103301
  peptide (1)..(395): Ceres Seq. ID no. 13612446

SEQ ID NO: 114541 - DNA, 1140 bp, Arabidopsis thaliana; identical to SEQ ID NO: 103302
  misc_feature (1)..(1140): Ceres Seq. ID no. 13612453
  misc_feature (1)..(1140): Ortholog of  Ceres SEQ ID NO 14305750 as cited in SEQ ID NO 52458
  misc_feature (1)..(1140): Ortholog of  Ceres SEQ ID NO 14314252 as cited in SEQ ID NO 57492
  misc_feature (1)..(1140): Ortholog of  Ceres SEQ ID NO 12608276 as cited in SEQ ID NO 57871
  misc_feature (1)..(1140): Ortholog of  Ceres SEQ ID NO 13598492 as cited in SEQ ID NO 63882
  misc_feature (1)..(1140): Ortholog of  Ceres SEQ ID NO 13657914 as cited in SEQ ID NO 66230
  misc_feature (1)..(1140): Ortholog of  Ceres SEQ ID NO 13595877 as cited in SEQ ID NO 67702
  misc_feature (1)..(1140): Ortholog of  Ceres SEQ ID NO 13622667 as cited in SEQ ID NO 0

SEQ ID NO: 114542 - protein, 338 aa, Arabidopsis thaliana; identical to SEQ ID NO: 103303
  peptide (1)..(338): Ceres Seq. ID no. 13612454

SEQ ID NO: 114543 - protein, 324 aa, Arabidopsis thaliana; identical to SEQ ID NO: 103304
  peptide (1)..(324): Ceres Seq. ID no. 13612455

SEQ ID NO: 114544 - protein, 300 aa, Arabidopsis thaliana; identical to SEQ ID NO: 103305
  peptide (1)..(300): Ceres Seq. ID no. 13612456

SEQ ID NO: 114545 - DNA, 1405 bp, Arabidopsis thaliana; identical to SEQ ID NO: 103306
  misc_feature (1)..(1405): Ceres Seq. ID no. 13612461
  misc_feature (1)..(1405): Ortholog of  Ceres SEQ ID NO 15176375 as cited in SEQ ID NO 53238
  misc_feature (1)..(1405): Ortholog of  Ceres SEQ ID NO 15170532 as cited in SEQ ID NO 55671
  misc_feature (1)..(1405): Ortholog of  Ceres SEQ ID NO 14316507 as cited in SEQ ID NO 57397
  misc_feature (1)..(1405): Ortholog of  Ceres SEQ ID NO 13663060 as cited in SEQ ID NO 60964
  misc_feature (1)..(1405): Ortholog of  Ceres SEQ ID NO 13598532 as cited in SEQ ID NO 65204
  misc_feature (1)..(1405): Ortholog of  Ceres SEQ ID NO 13656849 as cited in SEQ ID NO 65764
  misc_feature (1)..(1405): Ortholog of  Ceres SEQ ID NO 13656501 as cited in SEQ ID NO 69206

SEQ ID NO: 114546 - protein, 294 aa, Arabidopsis thaliana [sequence omitted]

SEQ ID NO: 114547 - protein, 237 aa, Arabidopsis thaliana; identical to SEQ ID NO: 29230
  peptide (1)..(237): Ceres Seq. ID no. 13612463

SEQ ID NO: 114548 - protein, 204 aa, Arabidopsis thaliana; identical to SEQ ID NO: 29231
  peptide (1)..(204): Ceres Seq. ID no. 13612464

SEQ ID NO: 114549 - DNA, 1318 bp, Arabidopsis thaliana; identical to SEQ ID NO: 103310
  misc_feature (1)..(1318): Ceres Seq. ID no. 13612465
  misc_feature (1)..(1318): Ortholog of  Ceres SEQ ID NO 13585976 as cited in SEQ ID NO 0

SEQ ID NO: 114550 - protein, 309 aa, Arabidopsis thaliana; identical to SEQ ID NO: 37206
  peptide (1)..(309): Ceres Seq. ID no. 13612466

SEQ ID NO: 114551 - protein, 248 aa, Arabidopsis thaliana; identical to SEQ ID NO: 37207
  peptide (1)..(248): Ceres Seq. ID no. 13612467

SEQ ID NO: 114552 - protein, 217 aa, Arabidopsis thaliana; identical to SEQ ID NO: 37208
  peptide (1)..(217): Ceres Seq. ID no. 13612468

SEQ ID NO: 114553 - DNA, 1317 bp, Arabidopsis thaliana; identical to SEQ ID NO: 103314
  misc_feature (1)..(1317): Ceres Seq. ID no. 13612480
  misc_feature (1)..(1317): Ortholog of  Ceres SEQ ID NO 14309755 as cited in SEQ ID NO 20741
  misc_feature (1)..(1317): Ortholog of  Ceres SEQ ID NO 13638746 as cited in SEQ ID NO 59296
  misc_feature (1)..(1317): Ortholog of  Ceres SEQ ID NO 13596474 as cited in SEQ ID NO 62169
  misc_feature (1)..(1317): Ortholog of  Ceres SEQ ID NO 13598714 as cited in SEQ ID NO 62656
  misc_feature (1)..(1317): Ortholog of  Ceres SEQ ID NO 13596969 as cited in SEQ ID NO 63375
  misc_feature (1)..(1317): Ortholog of  Ceres SEQ ID NO 13597519 as cited in SEQ ID NO 64759
  misc_feature (1)..(1317): Ortholog of  Ceres SEQ ID NO 13587054 as cited in SEQ ID NO 0

SEQ ID NO: 114554 - protein, 353 aa, Arabidopsis thaliana; identical to SEQ ID NO: 25028
  peptide (1)..(353): Ceres Seq. ID no. 13612481

SEQ ID NO: 114555 - protein, 332 aa, Arabidopsis thaliana; identical to SEQ ID NO: 25029
  peptide (1)..(332): Ceres Seq. ID no. 13612482

SEQ ID NO: 114556 - protein, 241 aa, Arabidopsis thaliana; identical to SEQ ID NO: 25030
  peptide (1)..(241): Ceres Seq. ID no. 13612483

SEQ ID NO: 114557 - DNA, 2020 bp, Arabidopsis thaliana; identical to SEQ ID NO: 103318
  misc_feature (1)..(2020): Ceres Seq. ID no. 13612484
  misc_feature (1)..(2020): Ortholog of  Ceres SEQ ID NO 13594037 as cited in SEQ ID NO 55666
  misc_feature (1)..(2020): Ortholog of  Ceres SEQ ID NO 13657707 as cited in SEQ ID NO 66407

SEQ ID NO: 114558 - protein, 609 aa, Arabidopsis thaliana; identical to SEQ ID NO: 38612
  peptide (1)..(609): Ceres Seq. ID no. 13612485

SEQ ID NO: 114559 - protein, 598 aa, Arabidopsis thaliana; identical to SEQ ID NO: 27422
  peptide (1)..(598): Ceres Seq. ID no. 13612486

SEQ ID NO: 114560 - protein, 494 aa, Arabidopsis thaliana; identical to SEQ ID NO: 27423
  peptide (1)..(494): Ceres Seq. ID no. 13612487

SEQ ID NO: 114561 - DNA, 1024 bp, Arabidopsis thaliana; identical to SEQ ID NO: 103322
  misc_feature (1)..(1024): Ceres Seq. ID no. 13612499
  misc_feature (1)..(1024): Ortholog of  Ceres SEQ ID NO 12609394 as cited in SEQ ID NO 52095

SEQ ID NO: 114562 - protein, 259 aa, Arabidopsis thaliana; identical to SEQ ID NO: 39589
  peptide (1)..(259): Ceres Seq. ID no. 13612500

SEQ ID NO: 114563 - protein, 245 aa, Arabidopsis thaliana; identical to SEQ ID NO: 39590
  peptide (1)..(245): Ceres Seq. ID no. 13612501

SEQ ID NO: 114564 - DNA, 1334 bp, Arabidopsis thaliana; identical to SEQ ID NO: 103325
  misc_feature (1)..(1334): Ceres Seq. ID no. 13612510
  misc_feature (1)..(1334): Ortholog of  Ceres SEQ ID NO 13590233 as cited in SEQ ID NO 64652

SEQ ID NO: 114565 - protein, 275 aa, Arabidopsis thaliana; identical to SEQ ID NO: 103326
  peptide (1)..(275): Ceres Seq. ID no. 13612511

SEQ ID NO: 114566 - protein, 230 aa, Arabidopsis thaliana; identical to SEQ ID NO: 103327
  peptide (1)..(230): Ceres Seq. ID no. 13612512

SEQ ID NO: 114567 - DNA, 1463 bp, Arabidopsis thaliana; identical to SEQ ID NO: 103328
  misc_feature (1)..(1463): Ceres Seq. ID no. 13612517
  misc_feature (1)..(1463): Ortholog of  Ceres SEQ ID NO 14304654 as cited in SEQ ID NO 53301
  misc_feature (1)..(1463): Ortholog of  Ceres SEQ ID NO 15172291 as cited in SEQ ID NO 55046
  misc_feature (1)..(1463): Ortholog of  Ceres SEQ ID NO 13658153 as cited in SEQ ID NO 66326
  misc_feature (1)..(1463): Ortholog of  Ceres SEQ ID NO 14303011 as cited in SEQ ID NO 67226

SEQ ID NO: 114568 - protein, 393 aa, Arabidopsis thaliana; identical to SEQ ID NO: 103329
  peptide (1)..(393): Ceres Seq. ID no. 13612518

SEQ ID NO: 114569 - protein, 389 aa, Arabidopsis thaliana; identical to SEQ ID NO: 74636
  peptide (1)..(389): Ceres Seq. ID no. 13612519

SEQ ID NO: 114570 - protein, 386 aa, Arabidopsis thaliana; identical to SEQ ID NO: 74637
  peptide (1)..(386): Ceres Seq. ID no. 13612520

SEQ ID NO: 114571 - DNA, 1055 bp, Arabidopsis thaliana; identical to SEQ ID NO: 103332
  misc_feature (1)..(1055): Ceres Seq. ID no. 13612541
  misc_feature (1)..(1055): Ortholog of  Ceres SEQ ID NO 13656486 as cited in SEQ ID NO 69202

SEQ ID NO: 114572 - protein, 290 aa, Arabidopsis thaliana; identical to SEQ ID NO: 103333
  peptide (1)..(290): Ceres Seq. ID no. 13612542

SEQ ID NO: 114573 - protein, 272 aa, Arabidopsis thaliana; identical to SEQ ID NO: 103334
  peptide (1)..(272): Ceres Seq. ID no. 13612543

SEQ ID NO: 114574 - protein, 261 aa, Arabidopsis thaliana; identical to SEQ ID NO: 103335
  peptide (1)..(261): Ceres Seq. ID no. 13612544

SEQ ID NO: 114575 - DNA, 1391 bp, Arabidopsis thaliana; identical to SEQ ID NO: 103336
  misc_feature (1)..(1391): Ceres Seq. ID no. 13612549
  misc_feature (1)..(1391): Ortholog of  Ceres SEQ ID NO 15176596 as cited in SEQ ID NO 55168
  misc_feature (1)..(1391): Ortholog of  Ceres SEQ ID NO 14301576 as cited in SEQ ID NO 62362

SEQ ID NO: 114576 - protein, 369 aa, Arabidopsis thaliana; identical to SEQ ID NO: 31087
  peptide (1)..(369): Ceres Seq. ID no. 13612550

SEQ ID NO: 114577 - protein, 365 aa, Arabidopsis thaliana; identical to SEQ ID NO: 31088
  peptide (1)..(365): Ceres Seq. ID no. 13612551

SEQ ID NO: 114578 - protein, 255 aa, Arabidopsis thaliana; identical to SEQ ID NO: 31089
  peptide (1)..(255): Ceres Seq. ID no. 13612552

SEQ ID NO: 114579 - DNA, 1334 bp, Arabidopsis thaliana; identical to SEQ ID NO: 103340
  misc_feature (1)..(1334): Ceres Seq. ID no. 13612560
  misc_feature (1)..(1334): Ortholog of  Ceres SEQ ID NO 15169300 as cited in SEQ ID NO 59572
  misc_feature (1)..(1334): Ortholog of  Ceres SEQ ID NO 15176407 as cited in SEQ ID NO 59620
  misc_feature (1)..(1334): Ortholog of  Ceres SEQ ID NO 13596876 as cited in SEQ ID NO 62696
  misc_feature (1)..(1334): Ortholog of  Ceres SEQ ID NO 13655442 as cited in SEQ ID NO 64359
  misc_feature (1)..(1334): Ortholog of  Ceres SEQ ID NO 14303652 as cited in SEQ ID NO 67569

SEQ ID NO: 114580 - protein, 287 aa, Arabidopsis thaliana; identical to SEQ ID NO: 103341
  peptide (1)..(287): Ceres Seq. ID no. 13612561

SEQ ID NO: 114581 - protein, 270 aa, Arabidopsis thaliana; identical to SEQ ID NO: 103342
  peptide (1)..(270): Ceres Seq. ID no. 13612562

SEQ ID NO: 114582 - protein, 265 aa, Arabidopsis thaliana; identical to SEQ ID NO: 103343
  peptide (1)..(265): Ceres Seq. ID no. 13612563

SEQ ID NO: 114583 - DNA, 1469 bp, Arabidopsis thaliana; identical to SEQ ID NO: 103344
  misc_feature (1)..(1469): Ceres Seq. ID no. 13612564
  misc_feature (1)..(1469): Ortholog of  Ceres SEQ ID NO 13495070 as cited in SEQ ID NO 53216
  misc_feature (1)..(1469): Ortholog of  Ceres SEQ ID NO 15176717 as cited in SEQ ID NO 0

SEQ ID NO: 114584 - protein, 361 aa, Arabidopsis thaliana; identical to SEQ ID NO: 103345
  peptide (1)..(361): Ceres Seq. ID no. 13612565

SEQ ID NO: 114585 - protein, 248 aa, Arabidopsis thaliana; identical to SEQ ID NO: 103346
  peptide (1)..(248): Ceres Seq. ID no. 13612566

SEQ ID NO: 114586 - protein, 224 aa, Arabidopsis thaliana; identical to SEQ ID NO: 103347
  peptide (1)..(224): Ceres Seq. ID no. 13612567

SEQ ID NO: 114587 - DNA, 1243 bp, Arabidopsis thaliana; identical to SEQ ID NO: 103348
  misc_feature (1)..(1243): Ceres Seq. ID no. 13612583
  misc_feature (1)..(1243): Ortholog of  Ceres SEQ ID NO 13639514 as cited in SEQ ID NO 55736
  misc_feature (1)..(1243): Ortholog of  Ceres SEQ ID NO 14312254 as cited in SEQ ID NO 59148
  misc_feature (1)..(1243): Ortholog of  Ceres SEQ ID NO 13662804 as cited in SEQ ID NO 65394
  misc_feature (1)..(1243): Ortholog of  Ceres SEQ ID NO 13656519 as cited in SEQ ID NO 69226

SEQ ID NO: 114588 - protein, 246 aa, Arabidopsis thaliana; identical to SEQ ID NO: 41222
  peptide (1)..(246): Ceres Seq. ID no. 13612584

SEQ ID NO: 114589 - protein, 243 aa, Arabidopsis thaliana; identical to SEQ ID NO: 41223
  peptide (1)..(243): Ceres Seq. ID no. 13612585

SEQ ID NO: 114590 - protein, 227 aa, Arabidopsis thaliana; identical to SEQ ID NO: 41224
  peptide (1)..(227): Ceres Seq. ID no. 13612586

SEQ ID NO: 114591 - DNA, 1293 bp, Arabidopsis thaliana; identical to SEQ ID NO: 103352
  misc_feature (1)..(1293): Ceres Seq. ID no. 13612594
  misc_feature (1)..(1293): Ortholog of  Ceres SEQ ID NO 14307273 as cited in SEQ ID NO 54302
  misc_feature (1)..(1293): Ortholog of  Ceres SEQ ID NO 14315317 as cited in SEQ ID NO 58242
  misc_feature (1)..(1293): Ortholog of  Ceres SEQ ID NO 13655375 as cited in SEQ ID NO 63347
  misc_feature (1)..(1293): Ortholog of  Ceres SEQ ID NO 12626166 as cited in SEQ ID NO 64505
  misc_feature (1)..(1293): Ortholog of  Ceres SEQ ID NO 14301599 as cited in SEQ ID NO 65699

SEQ ID NO: 114592 - protein, 348 aa, Arabidopsis thaliana; identical to SEQ ID NO: 103353
  peptide (1)..(348): Ceres Seq. ID no. 13612595

SEQ ID NO: 114593 - protein, 328 aa, Arabidopsis thaliana; identical to SEQ ID NO: 103354
  peptide (1)..(328): Ceres Seq. ID no. 13612596

SEQ ID NO: 114594 - protein, 318 aa, Arabidopsis thaliana; identical to SEQ ID NO: 103355
  peptide (1)..(318): Ceres Seq. ID no. 13612597

SEQ ID NO: 114595 - DNA, 1593 bp, Arabidopsis thaliana; identical to SEQ ID NO: 103356
  misc_feature (1)..(1593): Ceres Seq. ID no. 13612598
  misc_feature (1)..(1593): Ortholog of  Ceres SEQ ID NO 13596554 as cited in SEQ ID NO 62818

SEQ ID NO: 114596 - protein, 391 aa, Arabidopsis thaliana; identical to SEQ ID NO: 24955
  peptide (1)..(391): Ceres Seq. ID no. 13612599

SEQ ID NO: 114597 - protein, 304 aa, Arabidopsis thaliana; identical to SEQ ID NO: 24956
  peptide (1)..(304): Ceres Seq. ID no. 13612600

SEQ ID NO: 114598 - protein, 288 aa, Arabidopsis thaliana; identical to SEQ ID NO: 24957
  peptide (1)..(288): Ceres Seq. ID no. 13612601

SEQ ID NO: 114599 - DNA, 1356 bp, Arabidopsis thaliana; identical to SEQ ID NO: 103360
  misc_feature (1)..(1356): Ceres Seq. ID no. 13612605
  misc_feature (1)..(1356): Ortholog of  Ceres SEQ ID NO 13598513 as cited in SEQ ID NO 64102

SEQ ID NO: 114600 - protein, 373 aa, Arabidopsis thaliana; identical to SEQ ID NO: 103361
  peptide (1)..(373): Ceres Seq. ID no. 13612606

SEQ ID NO: 114601 - protein, 346 aa, Arabidopsis thaliana; identical to SEQ ID NO: 103362
  peptide (1)..(346): Ceres Seq. ID no. 13612607

SEQ ID NO: 114602 - protein, 334 aa, Arabidopsis thaliana; identical to SEQ ID NO: 103363
  peptide (1)..(334): Ceres Seq. ID no. 13612608

SEQ ID NO: 114603 - DNA, 2399 bp, Arabidopsis thaliana; identical to SEQ ID NO: 103364
  misc_feature (1)..(2399): Ceres Seq. ID no. 13612613
  misc_feature (1)..(2399): Ortholog of  Ceres SEQ ID NO 13654989 as cited in SEQ ID NO 63117
  misc_feature (1)..(2399): Ortholog of  Ceres SEQ ID NO 13584744 as cited in SEQ ID NO 69137

SEQ ID NO: 114604 - protein, 754 aa, Arabidopsis thaliana; identical to SEQ ID NO: 103365
  peptide (1)..(754): Ceres Seq. ID no. 13612614

SEQ ID NO: 114605 - protein, 732 aa, Arabidopsis thaliana; identical to SEQ ID NO: 103366
  peptide (1)..(732): Ceres Seq. ID no. 13612615

SEQ ID NO: 114606 - protein, 662 aa, Arabidopsis thaliana; identical to SEQ ID NO: 103367
  peptide (1)..(662): Ceres Seq. ID no. 13612616

SEQ ID NO: 114607 - DNA, 1839 bp, Arabidopsis thaliana; identical to SEQ ID NO: 103368
  misc_feature (1)..(1839): Ceres Seq. ID no. 13612617
  misc_feature (1)..(1839): Ortholog of  Ceres SEQ ID NO 14314536 as cited in SEQ ID NO 52436

SEQ ID NO: 114608 - protein, 487 aa, Arabidopsis thaliana; identical to SEQ ID NO: 42080
  peptide (1)..(487): Ceres Seq. ID no. 13612618

SEQ ID NO: 114609 - protein, 420 aa, Arabidopsis thaliana; identical to SEQ ID NO: 42081
  peptide (1)..(420): Ceres Seq. ID no. 13612619

SEQ ID NO: 114610 - protein, 276 aa, Arabidopsis thaliana; identical to SEQ ID NO: 42082
  peptide (1)..(276): Ceres Seq. ID no. 13612620

SEQ ID NO: 114611 - DNA, 1997 bp, Arabidopsis thaliana; identical to SEQ ID NO: 103372
  misc_feature (1)..(1997): Ceres Seq. ID no. 13612629
  misc_feature (1)..(1997): Ortholog of  Ceres SEQ ID NO 14314404 as cited in SEQ ID NO 57421
  misc_feature (1)..(1997): Ortholog of  Ceres SEQ ID NO 13493536 as cited in SEQ ID NO 58515
  misc_feature (1)..(1997): Ortholog of  Ceres SEQ ID NO 12618461 as cited in SEQ ID NO 64349

SEQ ID NO: 114612 - protein, 567 aa, Arabidopsis thaliana; identical to SEQ ID NO: 26469
  peptide (1)..(567): Ceres Seq. ID no. 13612630

SEQ ID NO: 114613 - protein, 530 aa, Arabidopsis thaliana; identical to SEQ ID NO: 26470
  peptide (1)..(530): Ceres Seq. ID no. 13612631

SEQ ID NO: 114614 - protein, 394 aa, Arabidopsis thaliana; identical to SEQ ID NO: 26471
  peptide (1)..(394): Ceres Seq. ID no. 13612632

SEQ ID NO: 114615 - DNA, 2156 bp, Arabidopsis thaliana; identical to SEQ ID NO: 103376
  misc_feature (1)..(2156): Ceres Seq. ID no. 13612633
  misc_feature (1)..(2156): Ortholog of  Ceres SEQ ID NO 15176298 as cited in SEQ ID NO 58961

SEQ ID NO: 114616 - protein, 509 aa, Arabidopsis thaliana; identical to SEQ ID NO: 103377
  peptide (1)..(509): Ceres Seq. ID no. 13612634

SEQ ID NO: 114617 - protein, 476 aa, Arabidopsis thaliana; identical to SEQ ID NO: 103378
  peptide (1)..(476): Ceres Seq. ID no. 13612635

SEQ ID NO: 114618 - protein, 325 aa, Arabidopsis thaliana; identical to SEQ ID NO: 103379
  peptide (1)..(325): Ceres Seq. ID no. 13612636

SEQ ID NO: 114619 - DNA, 1252 bp, Arabidopsis thaliana; identical to SEQ ID NO: 103380
  misc_feature (1)..(1252): Ceres Seq. ID no. 13612639
  misc_feature (1)..(1252): Ortholog of  Ceres SEQ ID NO 15169195 as cited in SEQ ID NO 55200
  misc_feature (1)..(1252): Ortholog of  Ceres SEQ ID NO 13581611 as cited in SEQ ID NO 59028
  misc_feature (1)..(1252): Ortholog of  Ceres SEQ ID NO 14301693 as cited in SEQ ID NO 69246

SEQ ID NO: 114620 - protein, 343 aa, Arabidopsis thaliana; identical to SEQ ID NO: 40052
  peptide (1)..(343): Ceres Seq. ID no. 13612640

SEQ ID NO: 114621 - protein, 281 aa, Arabidopsis thaliana; identical to SEQ ID NO: 40053
  peptide (1)..(281): Ceres Seq. ID no. 13612641

SEQ ID NO: 114622 - protein, 192 aa, Arabidopsis thaliana; identical to SEQ ID NO: 40054
  peptide (1)..(192): Ceres Seq. ID no. 13612642

SEQ ID NO: 114623 - DNA, 1338 bp, Arabidopsis thaliana; identical to SEQ ID NO: 103384
  misc_feature (1)..(1338): Ceres Seq. ID no. 13612654
  misc_feature (1)..(1338): Ortholog of  Ceres SEQ ID NO 15169655 as cited in SEQ ID NO 64922
  misc_feature (1)..(1338): Ortholog of  Ceres SEQ ID NO 13596004 as cited in SEQ ID NO 68212

SEQ ID NO: 114624 - protein, 352 aa, Arabidopsis thaliana; identical to SEQ ID NO: 103385
  peptide (1)..(352): Ceres Seq. ID no. 13612655

SEQ ID NO: 114625 - protein, 253 aa, Arabidopsis thaliana; identical to SEQ ID NO: 35113
  peptide (1)..(253): Ceres Seq. ID no. 13612656

SEQ ID NO: 114626 - DNA, 1153 bp, Arabidopsis thaliana; identical to SEQ ID NO: 103387
  misc_feature (1)..(1153): Ceres Seq. ID no. 13612661
  misc_feature (1)..(1153): Ortholog of  Ceres SEQ ID NO 13594308 as cited in SEQ ID NO 57706

SEQ ID NO: 114627 - protein, 305 aa, Arabidopsis thaliana; identical to SEQ ID NO: 103388
  peptide (1)..(305): Ceres Seq. ID no. 13612662

SEQ ID NO: 114628 - protein, 301 aa, Arabidopsis thaliana; identical to SEQ ID NO: 23774
  peptide (1)..(301): Ceres Seq. ID no. 13612663

SEQ ID NO: 114629 - protein, 209 aa, Arabidopsis thaliana; identical to SEQ ID NO: 23775
  peptide (1)..(209): Ceres Seq. ID no. 13612664

SEQ ID NO: 114630 - DNA, 842 bp, Arabidopsis thaliana; identical to SEQ ID NO: 103391
  misc_feature (1)..(842): Ceres Seq. ID no. 13612665
  misc_feature (1)..(842): Ortholog of  Ceres SEQ ID NO 14309148 as cited in SEQ ID NO 0

SEQ ID NO: 114631 - protein, 219 aa, Arabidopsis thaliana; identical to SEQ ID NO: 103392
  peptide (1)..(219): Ceres Seq. ID no. 13612666

SEQ ID NO: 114632 - protein, 199 aa, Arabidopsis thaliana; identical to SEQ ID NO: 103393
  peptide (1)..(199): Ceres Seq. ID no. 13612667

SEQ ID NO: 114633 - DNA, 1708 bp, Arabidopsis thaliana; identical to SEQ ID NO: 103394
  misc_feature (1)..(1708): Ceres Seq. ID no. 13612672
  misc_feature (1)..(1708): Ortholog of  Ceres SEQ ID NO 13639663 as cited in SEQ ID NO 57850

SEQ ID NO: 114634 - protein, 456 aa, Arabidopsis thaliana; identical to SEQ ID NO: 29406
  peptide (1)..(456): Ceres Seq. ID no. 13612673

SEQ ID NO: 114635 - protein, 367 aa, Arabidopsis thaliana; identical to SEQ ID NO: 29407
  peptide (1)..(367): Ceres Seq. ID no. 13612674

SEQ ID NO: 114636 - protein, 332 aa, Arabidopsis thaliana; identical to SEQ ID NO: 29408
  peptide (1)..(332): Ceres Seq. ID no. 13612675

SEQ ID NO: 114637 - DNA, 1464 bp, Arabidopsis thaliana; identical to SEQ ID NO: 103398
  misc_feature (1)..(1464): Ceres Seq. ID no. 13612680
  misc_feature (1)..(1464): Ortholog of  Ceres SEQ ID NO 15178909 as cited in SEQ ID NO 0

SEQ ID NO: 114638 - protein, 395 aa, Arabidopsis thaliana; identical to SEQ ID NO: 30029
  peptide (1)..(395): Ceres Seq. ID no. 13612681

SEQ ID NO: 114639 - protein, 339 aa, Arabidopsis thaliana; identical to SEQ ID NO: 30030
  peptide (1)..(339): Ceres Seq. ID no. 13612682

SEQ ID NO: 114640 - protein, 326 aa, Arabidopsis thaliana; identical to SEQ ID NO: 30031
  peptide (1)..(326): Ceres Seq. ID no. 13612683

SEQ ID NO: 114641 - DNA, 1869 bp, Arabidopsis thaliana; identical to SEQ ID NO: 103402
  misc_feature (1)..(1869): Ceres Seq. ID no. 13612691
  misc_feature (1)..(1869): Ortholog of  Ceres SEQ ID NO 14308221 as cited in SEQ ID NO 60363

SEQ ID NO: 114642 - protein, 520 aa, Arabidopsis thaliana; identical to SEQ ID NO: 27025
  peptide (1)..(520): Ceres Seq. ID no. 13612692

SEQ ID NO: 114643 - protein, 359 aa, Arabidopsis thaliana; identical to SEQ ID NO: 27026
  peptide (1)..(359): Ceres Seq. ID no. 13612693

SEQ ID NO: 114644 - protein, 302 aa, Arabidopsis thaliana; identical to SEQ ID NO: 27027
  peptide (1)..(302): Ceres Seq. ID no. 13612694

SEQ ID NO: 114645 - DNA, 840 bp, Arabidopsis thaliana; identical to SEQ ID NO: 103406
  misc_feature (1)..(840): Ceres Seq. ID no. 13612703
  misc_feature (1)..(840): Ortholog of  Ceres SEQ ID NO 15178424 as cited in SEQ ID NO 1107
  misc_feature (1)..(840): Ortholog of  Ceres SEQ ID NO 13661185 as cited in SEQ ID NO 61118
  misc_feature (1)..(840): Ortholog of  Ceres SEQ ID NO 14309350 as cited in SEQ ID NO 0
  misc_feature (1)..(840): Ortholog of  Ceres SEQ ID NO 15175181 as cited in SEQ ID NO 0

SEQ ID NO: 114646 - protein, 166 aa, Arabidopsis thaliana; identical to SEQ ID NO: 21805
  peptide (1)..(166): Ceres Seq. ID no. 13612704

SEQ ID NO: 114647 - protein, 138 aa, Arabidopsis thaliana; identical to SEQ ID NO: 21806
  peptide (1)..(138): Ceres Seq. ID no. 13612705

SEQ ID NO: 114648 - protein, 98 aa, Arabidopsis thaliana; identical to SEQ ID NO: 103409
  peptide (1)..(98): Ceres Seq. ID no. 13612706

SEQ ID NO: 114649 - DNA, 1246 bp, Arabidopsis thaliana; identical to SEQ ID NO: 103410
  misc_feature (1)..(1246): Ceres Seq. ID no. 13612717
  misc_feature (1)..(1246): Ortholog of  Ceres SEQ ID NO 15171275 as cited in SEQ ID NO 51428

SEQ ID NO: 114650 - protein, 356 aa, Arabidopsis thaliana; identical to SEQ ID NO: 103411
  peptide (1)..(356): Ceres Seq. ID no. 13612718

SEQ ID NO: 114651 - protein, 344 aa, Arabidopsis thaliana; identical to SEQ ID NO: 27936
  peptide (1)..(344): Ceres Seq. ID no. 13612719

SEQ ID NO: 114652 - protein, 243 aa, Arabidopsis thaliana; identical to SEQ ID NO: 27937
  peptide (1)..(243): Ceres Seq. ID no. 13612720

SEQ ID NO: 114653 - DNA, 952 bp, Arabidopsis thaliana; identical to SEQ ID NO: 103414
  misc_feature (1)..(952): Ceres Seq. ID no. 13612725
  misc_feature (1)..(952): Ortholog of  Ceres SEQ ID NO 13595271 as cited in SEQ ID NO 56058
  misc_feature (1)..(952): Ortholog of  Ceres SEQ ID NO 14315170 as cited in SEQ ID NO 60009
  misc_feature (1)..(952): Ortholog of  Ceres SEQ ID NO 13656105 as cited in SEQ ID NO 65310

SEQ ID NO: 114654 - protein, 206 aa, Arabidopsis thaliana; identical to SEQ ID NO: 103415
  peptide (1)..(206): Ceres Seq. ID no. 13612726

SEQ ID NO: 114655 - DNA, 2870 bp, Arabidopsis thaliana; identical to SEQ ID NO: 103416
  misc_feature (1)..(2870): Ceres Seq. ID no. 13612727
  misc_feature (1)..(2870): Ortholog of  Ceres SEQ ID NO 13654989 as cited in SEQ ID NO 63117
  misc_feature (1)..(2870): Ortholog of  Ceres SEQ ID NO 13584744 as cited in SEQ ID NO 69137

SEQ ID NO: 114656 - protein, 895 aa, Arabidopsis thaliana; identical to SEQ ID NO: 103417
  peptide (1)..(895): Ceres Seq. ID no. 13612728

SEQ ID NO: 114657 - DNA, 1595 bp, Arabidopsis thaliana; identical to SEQ ID NO: 103418
  misc_feature (1)..(1595): Ceres Seq. ID no. 13612737
  misc_feature (1)..(1595): Ortholog of  Ceres SEQ ID NO 15174752 as cited in SEQ ID NO 53279
  misc_feature (1)..(1595): Ortholog of  Ceres SEQ ID NO 14308389 as cited in SEQ ID NO 55226
  misc_feature (1)..(1595): Ortholog of  Ceres SEQ ID NO 15226087 as cited in SEQ ID NO 58655
  misc_feature (1)..(1595): Ortholog of  Ceres SEQ ID NO 13597162 as cited in SEQ ID NO 63955
  misc_feature (1)..(1595): Ortholog of  Ceres SEQ ID NO 14308049 as cited in SEQ ID NO 66203
  misc_feature (1)..(1595): Ortholog of  Ceres SEQ ID NO 14313292 as cited in SEQ ID NO 67393
  misc_feature (1)..(1595): Ortholog of  Ceres SEQ ID NO 14313567 as cited in SEQ ID NO 68074

SEQ ID NO: 114658 - protein, 450 aa, Arabidopsis thaliana; identical to SEQ ID NO: 103419
  peptide (1)..(450): Ceres Seq. ID no. 13612738

SEQ ID NO: 114659 - protein, 433 aa, Arabidopsis thaliana; identical to SEQ ID NO: 103420
  peptide (1)..(433): Ceres Seq. ID no. 13612739

SEQ ID NO: 114660 - protein, 424 aa, Arabidopsis thaliana; identical to SEQ ID NO: 103421
  peptide (1)..(424): Ceres Seq. ID no. 13612740

SEQ ID NO: 114661 - DNA, 690 bp, Arabidopsis thaliana; identical to SEQ ID NO: 103422
  misc_feature (1)..(690): Ceres Seq. ID no. 13612745
  misc_feature (1)..(690): Ortholog of  Ceres SEQ ID NO 13595613 as cited in SEQ ID NO 59866

SEQ ID NO: 114662 - protein, 171 aa, Arabidopsis thaliana; identical to SEQ ID NO: 103423
  peptide (1)..(171): Ceres Seq. ID no. 13612746

SEQ ID NO: 114663 - protein, 161 aa, Arabidopsis thaliana; identical to SEQ ID NO: 25474
  peptide (1)..(161): Ceres Seq. ID no. 13612747

SEQ ID NO: 114664 - protein, 87 aa, Arabidopsis thaliana; identical to SEQ ID NO: 25475
  peptide (1)..(87): Ceres Seq. ID no. 13612748

SEQ ID NO: 114665 - DNA, 675 bp, Arabidopsis thaliana; identical to SEQ ID NO: 103426
  misc_feature (1)..(675): Ceres Seq. ID no. 13612749
  misc_feature (1)..(675): Ortholog of  Ceres SEQ ID NO 12557654 as cited in SEQ ID NO 12
  misc_feature (1)..(675): Ortholog of  Ceres SEQ ID NO 15175150 as cited in SEQ ID NO 0

SEQ ID NO: 114666 - protein, 155 aa, Arabidopsis thaliana; identical to SEQ ID NO: 103427
  peptide (1)..(155): Ceres Seq. ID no. 13612750

SEQ ID NO: 114667 - DNA, 1276 bp, Arabidopsis thaliana; identical to SEQ ID NO: 103428
  misc_feature (1)..(1276): Ceres Seq. ID no. 13612751
  misc_feature (1)..(1276): Ortholog of  Ceres SEQ ID NO 12337669 as cited in SEQ ID NO 20493
  misc_feature (1)..(1276): Ortholog of  Ceres SEQ ID NO 13597524 as cited in SEQ ID NO 64782

SEQ ID NO: 114668 - protein, 348 aa, Arabidopsis thaliana; identical to SEQ ID NO: 103429
  peptide (1)..(348): Ceres Seq. ID no. 13612752

SEQ ID NO: 114669 - protein, 257 aa, Arabidopsis thaliana; identical to SEQ ID NO: 103430
  peptide (1)..(257): Ceres Seq. ID no. 13612753

SEQ ID NO: 114670 - protein, 246 aa, Arabidopsis thaliana; identical to SEQ ID NO: 103431
  peptide (1)..(246): Ceres Seq. ID no. 13612754

SEQ ID NO: 114671 - DNA, 1239 bp, Arabidopsis thaliana; identical to SEQ ID NO: 103432
  misc_feature (1)..(1239): Ceres Seq. ID no. 13612762
  misc_feature (1)..(1239): Ortholog of  Ceres SEQ ID NO 14315223 as cited in SEQ ID NO 52527
  misc_feature (1)..(1239): Ortholog of  Ceres SEQ ID NO 14307085 as cited in SEQ ID NO 54749

SEQ ID NO: 114672 - protein, 310 aa, Arabidopsis thaliana; identical to SEQ ID NO: 43028
  peptide (1)..(310): Ceres Seq. ID no. 13612763

SEQ ID NO: 114673 - protein, 181 aa, Arabidopsis thaliana; identical to SEQ ID NO: 43029
  peptide (1)..(181): Ceres Seq. ID no. 13612764

SEQ ID NO: 114674 - protein, 176 aa, Arabidopsis thaliana; identical to SEQ ID NO: 43030
  peptide (1)..(176): Ceres Seq. ID no. 13612765

SEQ ID NO: 114675 - DNA, 1130 bp, Arabidopsis thaliana; identical to SEQ ID NO: 103436
  misc_feature (1)..(1130): Ceres Seq. ID no. 13612766
  misc_feature (1)..(1130): Ortholog of  Ceres SEQ ID NO 12633565 as cited in SEQ ID NO 1190
  misc_feature (1)..(1130): Ortholog of  Ceres SEQ ID NO 15171390 as cited in SEQ ID NO 51650
  misc_feature (1)..(1130): Ortholog of  Ceres SEQ ID NO 13594845 as cited in SEQ ID NO 51940

SEQ ID NO: 114676 - protein, 261 aa, Arabidopsis thaliana; identical to SEQ ID NO: 23144
  peptide (1)..(261): Ceres Seq. ID no. 13612767

SEQ ID NO: 114677 - protein, 171 aa, Arabidopsis thaliana; identical to SEQ ID NO: 23145
  peptide (1)..(171): Ceres Seq. ID no. 13612768

SEQ ID NO: 114678 - DNA, 1831 bp, Arabidopsis thaliana; identical to SEQ ID NO: 103439
  misc_feature (1)..(1831): Ceres Seq. ID no. 13612773
  misc_feature (1)..(1831): Ortholog of  Ceres SEQ ID NO 14314319 as cited in SEQ ID NO 57500

SEQ ID NO: 114679 - protein, 448 aa, Arabidopsis thaliana; identical to SEQ ID NO: 103440
  peptide (1)..(448): Ceres Seq. ID no. 13612774

SEQ ID NO: 114680 - protein, 446 aa, Arabidopsis thaliana; identical to SEQ ID NO: 103441
  peptide (1)..(446): Ceres Seq. ID no. 13612775

SEQ ID NO: 114681 - protein, 394 aa, Arabidopsis thaliana; identical to SEQ ID NO: 103442
  peptide (1)..(394): Ceres Seq. ID no. 13612776

SEQ ID NO: 114682 - DNA, 959 bp, Arabidopsis thaliana; identical to SEQ ID NO: 103443
  misc_feature (1)..(959): Ceres Seq. ID no. 13612781
  misc_feature (1)..(959): Ortholog of  Ceres SEQ ID NO 13594163 as cited in SEQ ID NO 60426

SEQ ID NO: 114683 - protein, 281 aa, Arabidopsis thaliana; identical to SEQ ID NO: 103444
  peptide (1)..(281): Ceres Seq. ID no. 13612782

SEQ ID NO: 114684 - protein, 272 aa, Arabidopsis thaliana; identical to SEQ ID NO: 103445
  peptide (1)..(272): Ceres Seq. ID no. 13612783

SEQ ID NO: 114685 - protein, 196 aa, Arabidopsis thaliana; identical to SEQ ID NO: 103446
  peptide (1)..(196): Ceres Seq. ID no. 13612784

SEQ ID NO: 114686 - DNA, 1405 bp, Arabidopsis thaliana; identical to SEQ ID NO: 103447
  misc_feature (1)..(1405): Ceres Seq. ID no. 13612791
  misc_feature (1)..(1405): Ortholog of  Ceres SEQ ID NO 13598282 as cited in SEQ ID NO 68138

SEQ ID NO: 114687 - protein, 360 aa, Arabidopsis thaliana; identical to SEQ ID NO: 30881
  peptide (1)..(360): Ceres Seq. ID no. 13612792

SEQ ID NO: 114688 - protein, 358 aa, Arabidopsis thaliana; identical to SEQ ID NO: 30882
  peptide (1)..(358): Ceres Seq. ID no. 13612793

SEQ ID NO: 114689 - protein, 352 aa, Arabidopsis thaliana; identical to SEQ ID NO: 30883
  peptide (1)..(352): Ceres Seq. ID no. 13612794

SEQ ID NO: 114690 - DNA, 1249 bp, Arabidopsis thaliana; identical to SEQ ID NO: 103451
  misc_feature (1)..(1249): Ceres Seq. ID no. 13612795
  misc_feature (1)..(1249): Ortholog of  Ceres SEQ ID NO 13654583 as cited in SEQ ID NO 68599

SEQ ID NO: 114691 - protein, 336 aa, Arabidopsis thaliana; identical to SEQ ID NO: 24914
  peptide (1)..(336): Ceres Seq. ID no. 13612796

SEQ ID NO: 114692 - protein, 334 aa, Arabidopsis thaliana; identical to SEQ ID NO: 24915
  peptide (1)..(334): Ceres Seq. ID no. 13612797

SEQ ID NO: 114693 - protein, 332 aa, Arabidopsis thaliana; identical to SEQ ID NO: 24916
  peptide (1)..(332): Ceres Seq. ID no. 13612798

SEQ ID NO: 114694 - DNA, 2171 bp, Arabidopsis thaliana; identical to SEQ ID NO: 103455
  misc_feature (1)..(2171): Ceres Seq. ID no. 13612799
  misc_feature (1)..(2171): Ortholog of  Ceres SEQ ID NO 15169072 as cited in SEQ ID NO 53955
  misc_feature (1)..(2171): Ortholog of  Ceres SEQ ID NO 15224912 as cited in SEQ ID NO 63475
  misc_feature (1)..(2171): Ortholog of  Ceres SEQ ID NO 13659394 as cited in SEQ ID NO 67049

SEQ ID NO: 114695 - protein, 593 aa, Arabidopsis thaliana; identical to SEQ ID NO: 39767
  peptide (1)..(593): Ceres Seq. ID no. 13612800

SEQ ID NO: 114696 - protein, 578 aa, Arabidopsis thaliana; identical to SEQ ID NO: 39768
  peptide (1)..(578): Ceres Seq. ID no. 13612801

SEQ ID NO: 114697 - protein, 480 aa, Arabidopsis thaliana; identical to SEQ ID NO: 39769
  peptide (1)..(480): Ceres Seq. ID no. 13612802

SEQ ID NO: 114698 - DNA, 1637 bp, Arabidopsis thaliana; identical to SEQ ID NO: 103459
  misc_feature (1)..(1637): Ceres Seq. ID no. 13612803
  misc_feature (1)..(1637): Ortholog of  Ceres SEQ ID NO 13597511 as cited in SEQ ID NO 64735

SEQ ID NO: 114699 - protein, 462 aa, Arabidopsis thaliana; identical to SEQ ID NO: 103460
  peptide (1)..(462): Ceres Seq. ID no. 13612804

SEQ ID NO: 114700 - protein, 303 aa, Arabidopsis thaliana; identical to SEQ ID NO: 25984
  peptide (1)..(303): Ceres Seq. ID no. 13612805

SEQ ID NO: 114701 - protein, 283 aa, Arabidopsis thaliana; identical to SEQ ID NO: 25985
  peptide (1)..(283): Ceres Seq. ID no. 13612806

SEQ ID NO: 114702 - DNA, 1180 bp, Arabidopsis thaliana; identical to SEQ ID NO: 103463
  misc_feature (1)..(1180): Ceres Seq. ID no. 13612811
  misc_feature (1)..(1180): Ortholog of  Ceres SEQ ID NO 14315162 as cited in SEQ ID NO 60005
  misc_feature (1)..(1180): Ortholog of  Ceres SEQ ID NO 15169727 as cited in SEQ ID NO 60328
  misc_feature (1)..(1180): Ortholog of  Ceres SEQ ID NO 13659881 as cited in SEQ ID NO 66938

SEQ ID NO: 114703 - protein, 226 aa, Arabidopsis thaliana; identical to SEQ ID NO: 103464
  peptide (1)..(226): Ceres Seq. ID no. 13612812

SEQ ID NO: 114704 - protein, 224 aa, Arabidopsis thaliana; identical to SEQ ID NO: 103465
  peptide (1)..(224): Ceres Seq. ID no. 13612813

SEQ ID NO: 114705 - protein, 197 aa, Arabidopsis thaliana; identical to SEQ ID NO: 103466
  peptide (1)..(197): Ceres Seq. ID no. 13612814

SEQ ID NO: 114706 - DNA, 1574 bp, Arabidopsis thaliana; identical to SEQ ID NO: 103467
  misc_feature (1)..(1574): Ceres Seq. ID no. 13612819
  misc_feature (1)..(1574): Ortholog of  Ceres SEQ ID NO 15172426 as cited in SEQ ID NO 59156

SEQ ID NO: 114707 - protein, 358 aa, Arabidopsis thaliana; identical to SEQ ID NO: 27550
  peptide (1)..(358): Ceres Seq. ID no. 13612820

SEQ ID NO: 114708 - protein, 310 aa, Arabidopsis thaliana; identical to SEQ ID NO: 27551
  peptide (1)..(310): Ceres Seq. ID no. 13612821

SEQ ID NO: 114709 - protein, 277 aa, Arabidopsis thaliana; identical to SEQ ID NO: 27552
  peptide (1)..(277): Ceres Seq. ID no. 13612822

SEQ ID NO: 114710 - DNA, 1703 bp, Arabidopsis thaliana; identical to SEQ ID NO: 103471
  misc_feature (1)..(1703): Ceres Seq. ID no. 13612825
  misc_feature (1)..(1703): Ortholog of  Ceres SEQ ID NO 13590739 as cited in SEQ ID NO 66960

SEQ ID NO: 114711 - protein, 438 aa, Arabidopsis thaliana; identical to SEQ ID NO: 21905
  peptide (1)..(438): Ceres Seq. ID no. 13612826

SEQ ID NO: 114712 - DNA, 978 bp, Arabidopsis thaliana; identical to SEQ ID NO: 103473
  misc_feature (1)..(978): Ceres Seq. ID no. 13612827
  misc_feature (1)..(978): Ortholog of  Ceres SEQ ID NO 12610607 as cited in SEQ ID NO 56214
  misc_feature (1)..(978): Ortholog of  Ceres SEQ ID NO 13664294 as cited in SEQ ID NO 61328
  misc_feature (1)..(978): Ortholog of  Ceres SEQ ID NO 13596425 as cited in SEQ ID NO 62039

SEQ ID NO: 114713 - protein, 238 aa, Arabidopsis thaliana; identical to SEQ ID NO: 28758
  peptide (1)..(238): Ceres Seq. ID no. 13612828

SEQ ID NO: 114714 - protein, 168 aa, Arabidopsis thaliana; identical to SEQ ID NO: 28759
  peptide (1)..(168): Ceres Seq. ID no. 13612829

SEQ ID NO: 114715 - protein, 155 aa, Arabidopsis thaliana; identical to SEQ ID NO: 28760
  peptide (1)..(155): Ceres Seq. ID no. 13612830

SEQ ID NO: 114716 - DNA, 870 bp, Arabidopsis thaliana; identical to SEQ ID NO: 103477
  misc_feature (1)..(870): Ceres Seq. ID no. 13612836
  misc_feature (1)..(870): Ortholog of  Ceres SEQ ID NO 14302000 as cited in SEQ ID NO 52175

SEQ ID NO: 114717 - protein, 187 aa, Arabidopsis thaliana; identical to SEQ ID NO: 103478
  peptide (1)..(187): Ceres Seq. ID no. 13612837

SEQ ID NO: 114718 - protein, 159 aa, Arabidopsis thaliana; identical to SEQ ID NO: 103479
  peptide (1)..(159): Ceres Seq. ID no. 13612838

SEQ ID NO: 114719 - protein, 94 aa, Arabidopsis thaliana; identical to SEQ ID NO: 103480
  peptide (1)..(94): Ceres Seq. ID no. 13612839

SEQ ID NO: 114720 - DNA, 1616 bp, Arabidopsis thaliana; identical to SEQ ID NO: 103481
  misc_feature (1)..(1616): Ceres Seq. ID no. 13612840
  misc_feature (1)..(1616): Ortholog of  Ceres SEQ ID NO 13654166 as cited in SEQ ID NO 68381
  misc_feature (1)..(1616): Ortholog of  Ceres SEQ ID NO 13599720 as cited in SEQ ID NO 0

SEQ ID NO: 114721 - protein, 392 aa, Arabidopsis thaliana; identical to SEQ ID NO: 103482
  peptide (1)..(392): Ceres Seq. ID no. 13612841

SEQ ID NO: 114722 - protein, 347 aa, Arabidopsis thaliana; identical to SEQ ID NO: 103483
  peptide (1)..(347): Ceres Seq. ID no. 13612842

SEQ ID NO: 114723 - protein, 324 aa, Arabidopsis thaliana; identical to SEQ ID NO: 103484
  peptide (1)..(324): Ceres Seq. ID no. 13612843

SEQ ID NO: 114724 - DNA, 2027 bp, Arabidopsis thaliana; identical to SEQ ID NO: 103485
  misc_feature (1)..(2027): Ceres Seq. ID no. 13612844
  misc_feature (1)..(2027): Ortholog of  Ceres SEQ ID NO 14301944 as cited in SEQ ID NO 0

SEQ ID NO: 114725 - protein, 603 aa, Arabidopsis thaliana; identical to SEQ ID NO: 103486
  peptide (1)..(603): Ceres Seq. ID no. 13612845

SEQ ID NO: 114726 - protein, 548 aa, Arabidopsis thaliana; identical to SEQ ID NO: 103487
  peptide (1)..(548): Ceres Seq. ID no. 13612846

SEQ ID NO: 114727 - protein, 491 aa, Arabidopsis thaliana; identical to SEQ ID NO: 103488
  peptide (1)..(491): Ceres Seq. ID no. 13612847

SEQ ID NO: 114728 - DNA, 608 bp, Arabidopsis thaliana; identical to SEQ ID NO: 103489
  misc_feature (1)..(608): Ceres Seq. ID no. 13612860
  misc_feature (1)..(608): Ortholog of  Ceres SEQ ID NO 12556956 as cited in SEQ ID NO 78

SEQ ID NO: 114729 - protein, 166 aa, Arabidopsis thaliana; identical to SEQ ID NO: 103490
  peptide (1)..(166): Ceres Seq. ID no. 13612861

SEQ ID NO: 114730 - protein, 160 aa, Arabidopsis thaliana; identical to SEQ ID NO: 36884
  peptide (1)..(160): Ceres Seq. ID no. 13612862

SEQ ID NO: 114731 - protein, 109 aa, Arabidopsis thaliana; identical to SEQ ID NO: 36885
  peptide (1)..(109): Ceres Seq. ID no. 13612863

SEQ ID NO: 114732 - DNA, 1451 bp, Arabidopsis thaliana; identical to SEQ ID NO: 103493
  misc_feature (1)..(1451): Ceres Seq. ID no. 13612864
  misc_feature (1)..(1451): Ortholog of  Ceres SEQ ID NO 13655660 as cited in SEQ ID NO 63727

SEQ ID NO: 114733 - protein, 404 aa, Arabidopsis thaliana; identical to SEQ ID NO: 22285
  peptide (1)..(404): Ceres Seq. ID no. 13612865

SEQ ID NO: 114734 - protein, 398 aa, Arabidopsis thaliana; identical to SEQ ID NO: 22286
  peptide (1)..(398): Ceres Seq. ID no. 13612866

SEQ ID NO: 114735 - protein, 293 aa, Arabidopsis thaliana; identical to SEQ ID NO: 22287
  peptide (1)..(293): Ceres Seq. ID no. 13612867

SEQ ID NO: 114736 - DNA, 1127 bp, Arabidopsis thaliana; identical to SEQ ID NO: 103497
  misc_feature (1)..(1127): Ceres Seq. ID no. 13612868
  misc_feature (1)..(1127): Ortholog of  Ceres SEQ ID NO 15172958 as cited in SEQ ID NO 51206
  misc_feature (1)..(1127): Ortholog of  Ceres SEQ ID NO 15171139 as cited in SEQ ID NO 60093

SEQ ID NO: 114737 - protein, 314 aa, Arabidopsis thaliana; identical to SEQ ID NO: 103498
  peptide (1)..(314): Ceres Seq. ID no. 13612869

SEQ ID NO: 114738 - protein, 263 aa, Arabidopsis thaliana; identical to SEQ ID NO: 103499
  peptide (1)..(263): Ceres Seq. ID no. 13612870

SEQ ID NO: 114739 - DNA, 831 bp, Arabidopsis thaliana; identical to SEQ ID NO: 103500
  misc_feature (1)..(831): Ceres Seq. ID no. 13612875
  misc_feature (1)..(831): Ortholog of  Ceres SEQ ID NO 12611082 as cited in SEQ ID NO 55853
  misc_feature (1)..(831): Ortholog of  Ceres SEQ ID NO 13664306 as cited in SEQ ID NO 61670

SEQ ID NO: 114740 - protein, 156 aa, Arabidopsis thaliana; identical to SEQ ID NO: 36014
  peptide (1)..(156): Ceres Seq. ID no. 13612876

SEQ ID NO: 114741 - protein, 119 aa, Arabidopsis thaliana; identical to SEQ ID NO: 36015
  peptide (1)..(119): Ceres Seq. ID no. 13612877

SEQ ID NO: 114742 - protein, 88 aa, Arabidopsis thaliana; identical to SEQ ID NO: 103503
  peptide (1)..(88): Ceres Seq. ID no. 13612878

SEQ ID NO: 114743 - DNA, 665 bp, Arabidopsis thaliana; identical to SEQ ID NO: 103504
  misc_feature (1)..(665): Ceres Seq. ID no. 13612885
  misc_feature (1)..(665): Ortholog of  Ceres SEQ ID NO 13575779 as cited in SEQ ID NO 20515

SEQ ID NO: 114744 - protein, 176 aa, Arabidopsis thaliana; identical to SEQ ID NO: 103505
  peptide (1)..(176): Ceres Seq. ID no. 13612886

SEQ ID NO: 114745 - protein, 164 aa, Arabidopsis thaliana; identical to SEQ ID NO: 20517
  peptide (1)..(164): Ceres Seq. ID no. 13612887

SEQ ID NO: 114746 - protein, 113 aa, Arabidopsis thaliana; identical to SEQ ID NO: 20518
  peptide (1)..(113): Ceres Seq. ID no. 13612888

SEQ ID NO: 114747 - DNA, 1362 bp, Arabidopsis thaliana; identical to SEQ ID NO: 103508
  misc_feature (1)..(1362): Ceres Seq. ID no. 13612901
  misc_feature (1)..(1362): Ortholog of  Ceres SEQ ID NO 12636774 as cited in SEQ ID NO 372
  misc_feature (1)..(1362): Ortholog of  Ceres SEQ ID NO 12578315 as cited in SEQ ID NO 62451
  misc_feature (1)..(1362): Ortholog of  Ceres SEQ ID NO 12615466 as cited in SEQ ID NO 62761
  misc_feature (1)..(1362): Ortholog of  Ceres SEQ ID NO 13597295 as cited in SEQ ID NO 63743
  misc_feature (1)..(1362): Ortholog of  Ceres SEQ ID NO 12617090 as cited in SEQ ID NO 64005
  misc_feature (1)..(1362): Ortholog of  Ceres SEQ ID NO 13597439 as cited in SEQ ID NO 64081
  misc_feature (1)..(1362): Ortholog of  Ceres SEQ ID NO 13597233 as cited in SEQ ID NO 64370
  misc_feature (1)..(1362): Ortholog of  Ceres SEQ ID NO 13584577 as cited in SEQ ID NO 65298
  misc_feature (1)..(1362): Ortholog of  Ceres SEQ ID NO 13598327 as cited in SEQ ID NO 68040

SEQ ID NO: 114748 - protein, 362 aa, Arabidopsis thaliana; identical to SEQ ID NO: 103509
  peptide (1)..(362): Ceres Seq. ID no. 13612902

SEQ ID NO: 114749 - protein, 325 aa, Arabidopsis thaliana; identical to SEQ ID NO: 103510
  peptide (1)..(325): Ceres Seq. ID no. 13612903

SEQ ID NO: 114750 - DNA, 1480 bp, Arabidopsis thaliana; identical to SEQ ID NO: 103511
  misc_feature (1)..(1480): Ceres Seq. ID no. 13612907
  misc_feature (1)..(1480): Ortholog of  Ceres SEQ ID NO 13593987 as cited in SEQ ID NO 54961

SEQ ID NO: 114751 - protein, 410 aa, Arabidopsis thaliana; identical to SEQ ID NO: 103512
  peptide (1)..(410): Ceres Seq. ID no. 13612908

SEQ ID NO: 114752 - protein, 392 aa, Arabidopsis thaliana; identical to SEQ ID NO: 103513
  peptide (1)..(392): Ceres Seq. ID no. 13612909

SEQ ID NO: 114753 - protein, 240 aa, Arabidopsis thaliana; identical to SEQ ID NO: 103514
  peptide (1)..(240): Ceres Seq. ID no. 13612910

SEQ ID NO: 114754 - DNA, 1213 bp, Arabidopsis thaliana; identical to SEQ ID NO: 103515
  misc_feature (1)..(1213): Ceres Seq. ID no. 13612931
  misc_feature (1)..(1213): Ortholog of  Ceres SEQ ID NO 15172464 as cited in SEQ ID NO 59111

SEQ ID NO: 114755 - protein, 303 aa, Arabidopsis thaliana; identical to SEQ ID NO: 103516
  peptide (1)..(303): Ceres Seq. ID no. 13612932

SEQ ID NO: 114756 - protein, 160 aa, Arabidopsis thaliana; identical to SEQ ID NO: 103517
  peptide (1)..(160): Ceres Seq. ID no. 13612933

SEQ ID NO: 114757 - DNA, 1072 bp, Arabidopsis thaliana; identical to SEQ ID NO: 103518
  misc_feature (1)..(1072): Ceres Seq. ID no. 13612941
  misc_feature (1)..(1072): Ortholog of  Ceres SEQ ID NO 12608127 as cited in SEQ ID NO 57579
  misc_feature (1)..(1072): Ortholog of  Ceres SEQ ID NO 12634558 as cited in SEQ ID NO 0

SEQ ID NO: 114758 - protein, 279 aa, Arabidopsis thaliana; identical to SEQ ID NO: 36338
  peptide (1)..(279): Ceres Seq. ID no. 13612942

SEQ ID NO: 114759 - protein, 272 aa, Arabidopsis thaliana; identical to SEQ ID NO: 36339
  peptide (1)..(272): Ceres Seq. ID no. 13612943

SEQ ID NO: 114760 - protein, 187 aa, Arabidopsis thaliana; identical to SEQ ID NO: 36340
  peptide (1)..(187): Ceres Seq. ID no. 13612944

SEQ ID NO: 114761 - DNA, 3358 bp, Arabidopsis thaliana; identical to SEQ ID NO: 103522
  misc_feature (1)..(3358): Ceres Seq. ID no. 13612945
  misc_feature (1)..(3358): Ortholog of  Ceres SEQ ID NO 14313220 as cited in SEQ ID NO 66007
  misc_feature (1)..(3358): Ortholog of  Ceres SEQ ID NO 13658778 as cited in SEQ ID NO 66511

SEQ ID NO: 114762 - protein, 1049 aa, Arabidopsis thaliana; identical to SEQ ID NO: 103523
  peptide (1)..(1049): Ceres Seq. ID no. 13612946

SEQ ID NO: 114763 - protein, 1044 aa, Arabidopsis thaliana; identical to SEQ ID NO: 103524
  peptide (1)..(1044): Ceres Seq. ID no. 13612947

SEQ ID NO: 114764 - protein, 770 aa, Arabidopsis thaliana; identical to SEQ ID NO: 75253
  peptide (1)..(770): Ceres Seq. ID no. 13612948

SEQ ID NO: 114765 - DNA, 1220 bp, Arabidopsis thaliana; identical to SEQ ID NO: 103526
  misc_feature (1)..(1220): Ceres Seq. ID no. 13612953
  misc_feature (1)..(1220): Ortholog of  Ceres SEQ ID NO 13595626 as cited in SEQ ID NO 51116

SEQ ID NO: 114766 - protein, 315 aa, Arabidopsis thaliana; identical to SEQ ID NO: 35809
  peptide (1)..(315): Ceres Seq. ID no. 13612954

SEQ ID NO: 114767 - protein, 309 aa, Arabidopsis thaliana; identical to SEQ ID NO: 35810
  peptide (1)..(309): Ceres Seq. ID no. 13612955

SEQ ID NO: 114768 - protein, 257 aa, Arabidopsis thaliana; identical to SEQ ID NO: 35811
  peptide (1)..(257): Ceres Seq. ID no. 13612956

SEQ ID NO: 114769 - DNA, 1434 bp, Arabidopsis thaliana; identical to SEQ ID NO: 103530
  misc_feature (1)..(1434): Ceres Seq. ID no. 13612957
  misc_feature (1)..(1434): Ortholog of  Ceres SEQ ID NO 13597160 as cited in SEQ ID NO 64016
  misc_feature (1)..(1434): Ortholog of  Ceres SEQ ID NO 15169659 as cited in SEQ ID NO 64152

SEQ ID NO: 114770 - protein, 435 aa, Arabidopsis thaliana; identical to SEQ ID NO: 36305
  peptide (1)..(435): Ceres Seq. ID no. 13612958

SEQ ID NO: 114771 - protein, 403 aa, Arabidopsis thaliana; identical to SEQ ID NO: 36306
  peptide (1)..(403): Ceres Seq. ID no. 13612959

SEQ ID NO: 114772 - protein, 374 aa, Arabidopsis thaliana; identical to SEQ ID NO: 36307
  peptide (1)..(374): Ceres Seq. ID no. 13612960

SEQ ID NO: 114773 - DNA, 1789 bp, Arabidopsis thaliana; identical to SEQ ID NO: 103534
  misc_feature (1)..(1789): Ceres Seq. ID no. 13612965
  misc_feature (1)..(1789): Ortholog of  Ceres SEQ ID NO 13656138 as cited in SEQ ID NO 65492
  misc_feature (1)..(1789): Ortholog of  Ceres SEQ ID NO 14301542 as cited in SEQ ID NO 66246

SEQ ID NO: 114774 - protein, 595 aa, Arabidopsis thaliana; identical to SEQ ID NO: 39389
  peptide (1)..(595): Ceres Seq. ID no. 13612966

SEQ ID NO: 114775 - protein, 588 aa, Arabidopsis thaliana; identical to SEQ ID NO: 39390
  peptide (1)..(588): Ceres Seq. ID no. 13612967

SEQ ID NO: 114776 - protein, 400 aa, Arabidopsis thaliana; identical to SEQ ID NO: 39391
  peptide (1)..(400): Ceres Seq. ID no. 13612968

SEQ ID NO: 114777 - DNA, 1272 bp, Arabidopsis thaliana; identical to SEQ ID NO: 103538
  misc_feature (1)..(1272): Ceres Seq. ID no. 13612973
  misc_feature (1)..(1272): Ortholog of  Ceres SEQ ID NO 13662721 as cited in SEQ ID NO 64602

SEQ ID NO: 114778 - protein, 310 aa, Arabidopsis thaliana; identical to SEQ ID NO: 103539
  peptide (1)..(310): Ceres Seq. ID no. 13612974

SEQ ID NO: 114779 - protein, 276 aa, Arabidopsis thaliana; identical to SEQ ID NO: 103540
  peptide (1)..(276): Ceres Seq. ID no. 13612975

SEQ ID NO: 114780 - protein, 258 aa, Arabidopsis thaliana; identical to SEQ ID NO: 103541
  peptide (1)..(258): Ceres Seq. ID no. 13612976

SEQ ID NO: 114781 - DNA, 1093 bp, Arabidopsis thaliana; identical to SEQ ID NO: 103542
  misc_feature (1)..(1093): Ceres Seq. ID no. 13612977
  misc_feature (1)..(1093): Ortholog of  Ceres SEQ ID NO 13597757 as cited in SEQ ID NO 65472

SEQ ID NO: 114782 - protein, 254 aa, Arabidopsis thaliana; identical to SEQ ID NO: 28547
  peptide (1)..(254): Ceres Seq. ID no. 13612978

SEQ ID NO: 114783 - protein, 252 aa, Arabidopsis thaliana; identical to SEQ ID NO: 28548
  peptide (1)..(252): Ceres Seq. ID no. 13612979

SEQ ID NO: 114784 - protein, 246 aa, Arabidopsis thaliana; identical to SEQ ID NO: 28549
  peptide (1)..(246): Ceres Seq. ID no. 13612980

SEQ ID NO: 114785 - DNA, 1189 bp, Arabidopsis thaliana; identical to SEQ ID NO: 103546
  misc_feature (1)..(1189): Ceres Seq. ID no. 13612993
  misc_feature (1)..(1189): Ortholog of  Ceres SEQ ID NO 15174737 as cited in SEQ ID NO 52912
  misc_feature (1)..(1189): Ortholog of  Ceres SEQ ID NO 13624551 as cited in SEQ ID NO 0

SEQ ID NO: 114786 - protein, 370 aa, Arabidopsis thaliana; identical to SEQ ID NO: 21278
  peptide (1)..(370): Ceres Seq. ID no. 13612994

SEQ ID NO: 114787 - protein, 353 aa, Arabidopsis thaliana; identical to SEQ ID NO: 21279
  peptide (1)..(353): Ceres Seq. ID no. 13612995

SEQ ID NO: 114788 - protein, 245 aa, Arabidopsis thaliana; identical to SEQ ID NO: 21280
  peptide (1)..(245): Ceres Seq. ID no. 13612996

SEQ ID NO: 114789 - DNA, 746 bp, Arabidopsis thaliana; identical to SEQ ID NO: 103550
  misc_feature (1)..(746): Ceres Seq. ID no. 13613001
  misc_feature (1)..(746): Ortholog of  Ceres SEQ ID NO 12624284 as cited in SEQ ID NO 61595
  misc_feature (1)..(746): Ortholog of  Ceres SEQ ID NO 15225557 as cited in SEQ ID NO 0

SEQ ID NO: 114790 - protein, 181 aa, Arabidopsis thaliana; identical to SEQ ID NO: 103551
  peptide (1)..(181): Ceres Seq. ID no. 13613002

SEQ ID NO: 114791 - protein, 167 aa, Arabidopsis thaliana; identical to SEQ ID NO: 103552
  peptide (1)..(167): Ceres Seq. ID no. 13613003

SEQ ID NO: 114792 - DNA, 801 bp, Arabidopsis thaliana; identical to SEQ ID NO: 103553
  misc_feature (1)..(801): Ceres Seq. ID no. 13613013
  misc_feature (1)..(801): Ortholog of  Ceres SEQ ID NO 14309614 as cited in SEQ ID NO 52633
  misc_feature (1)..(801): Ortholog of  Ceres SEQ ID NO 15172691 as cited in SEQ ID NO 56148
  misc_feature (1)..(801): Ortholog of  Ceres SEQ ID NO 15226850 as cited in SEQ ID NO 62501
  misc_feature (1)..(801): Ortholog of  Ceres SEQ ID NO 15174297 as cited in SEQ ID NO 0

SEQ ID NO: 114793 - protein, 183 aa, Arabidopsis thaliana; identical to SEQ ID NO: 103554
  peptide (1)..(183): Ceres Seq. ID no. 13613014

SEQ ID NO: 114794 - protein, 149 aa, Arabidopsis thaliana; identical to SEQ ID NO: 27688
  peptide (1)..(149): Ceres Seq. ID no. 13613015

SEQ ID NO: 114795 - protein, 113 aa, Arabidopsis thaliana; identical to SEQ ID NO: 27689
  peptide (1)..(113): Ceres Seq. ID no. 13613016

SEQ ID NO: 114796 - DNA, 1352 bp, Arabidopsis thaliana; identical to SEQ ID NO: 103557
  misc_feature (1)..(1352): Ceres Seq. ID no. 13613017
  misc_feature (1)..(1352): Ortholog of  Ceres SEQ ID NO 13502858 as cited in SEQ ID NO 65109

SEQ ID NO: 114797 - protein, 309 aa, Arabidopsis thaliana; identical to SEQ ID NO: 24718
  peptide (1)..(309): Ceres Seq. ID no. 13613018

SEQ ID NO: 114798 - protein, 267 aa, Arabidopsis thaliana; identical to SEQ ID NO: 24719
  peptide (1)..(267): Ceres Seq. ID no. 13613019

SEQ ID NO: 114799 - protein, 238 aa, Arabidopsis thaliana; identical to SEQ ID NO: 24720
  peptide (1)..(238): Ceres Seq. ID no. 13613020

SEQ ID NO: 114800 - DNA, 1665 bp, Arabidopsis thaliana; identical to SEQ ID NO: 103561
  misc_feature (1)..(1665): Ceres Seq. ID no. 13613021
  misc_feature (1)..(1665): Ortholog of  Ceres SEQ ID NO 13502874 as cited in SEQ ID NO 66298
  misc_feature (1)..(1665): Ortholog of  Ceres SEQ ID NO 12614124 as cited in SEQ ID NO 68392

SEQ ID NO: 114801 - protein, 518 aa, Arabidopsis thaliana; identical to SEQ ID NO: 103562
  peptide (1)..(518): Ceres Seq. ID no. 13613022

SEQ ID NO: 114802 - protein, 513 aa, Arabidopsis thaliana; identical to SEQ ID NO: 42595
  peptide (1)..(513): Ceres Seq. ID no. 13613023

SEQ ID NO: 114803 - protein, 377 aa, Arabidopsis thaliana; identical to SEQ ID NO: 42596
  peptide (1)..(377): Ceres Seq. ID no. 13613024

SEQ ID NO: 114804 - DNA, 2000 bp, Arabidopsis thaliana; identical to SEQ ID NO: 103565
  misc_feature (1)..(2000): Ceres Seq. ID no. 13613031
  misc_feature (1)..(2000): Ortholog of  Ceres SEQ ID NO 15177289 as cited in SEQ ID NO 59364

SEQ ID NO: 114805 - protein, 282 aa, Arabidopsis thaliana; identical to SEQ ID NO: 41915
  peptide (1)..(282): Ceres Seq. ID no. 13613032

SEQ ID NO: 114806 - protein, 244 aa, Arabidopsis thaliana; identical to SEQ ID NO: 41916
  peptide (1)..(244): Ceres Seq. ID no. 13613033

SEQ ID NO: 114807 - DNA, 1666 bp, Arabidopsis thaliana; identical to SEQ ID NO: 103568
  misc_feature (1)..(1666): Ceres Seq. ID no. 13613034
  misc_feature (1)..(1666): Ortholog of  Ceres SEQ ID NO 13504015 as cited in SEQ ID NO 51020
  misc_feature (1)..(1666): Ortholog of  Ceres SEQ ID NO 13597643 as cited in SEQ ID NO 65208

SEQ ID NO: 114808 - protein, 390 aa, Arabidopsis thaliana; identical to SEQ ID NO: 103569
  peptide (1)..(390): Ceres Seq. ID no. 13613035

SEQ ID NO: 114809 - protein, 319 aa, Arabidopsis thaliana; identical to SEQ ID NO: 103570
  peptide (1)..(319): Ceres Seq. ID no. 13613036

SEQ ID NO: 114810 - protein, 294 aa, Arabidopsis thaliana; identical to SEQ ID NO: 103571
  peptide (1)..(294): Ceres Seq. ID no. 13613037

SEQ ID NO: 114811 - DNA, 812 bp, Arabidopsis thaliana; identical to SEQ ID NO: 103572
  misc_feature (1)..(812): Ceres Seq. ID no. 13613069
  misc_feature (1)..(812): Ortholog of  Ceres SEQ ID NO 12583465 as cited in SEQ ID NO 56513
  misc_feature (1)..(812): Ortholog of  Ceres SEQ ID NO 14309546 as cited in SEQ ID NO 0

SEQ ID NO: 114812 - protein, 178 aa, Arabidopsis thaliana; identical to SEQ ID NO: 34914
  peptide (1)..(178): Ceres Seq. ID no. 13613070

SEQ ID NO: 114813 - DNA, 1441 bp, Arabidopsis thaliana; identical to SEQ ID NO: 103574
  misc_feature (1)..(1441): Ceres Seq. ID no. 13613078
  misc_feature (1)..(1441): Ortholog of  Ceres SEQ ID NO 13645078 as cited in SEQ ID NO 51158

SEQ ID NO: 114814 - protein, 410 aa, Arabidopsis thaliana; identical to SEQ ID NO: 29578
  peptide (1)..(410): Ceres Seq. ID no. 13613079

SEQ ID NO: 114815 - protein, 389 aa, Arabidopsis thaliana; identical to SEQ ID NO: 29579
  peptide (1)..(389): Ceres Seq. ID no. 13613080

SEQ ID NO: 114816 - protein, 343 aa, Arabidopsis thaliana; identical to SEQ ID NO: 29580
  peptide (1)..(343): Ceres Seq. ID no. 13613081

SEQ ID NO: 114817 - DNA, 672 bp, Arabidopsis thaliana; identical to SEQ ID NO: 103578
  misc_feature (1)..(672): Ceres Seq. ID no. 13613082
  misc_feature (1)..(672): Ortholog of  Ceres SEQ ID NO 15179062 as cited in SEQ ID NO 0

SEQ ID NO: 114818 - protein, 167 aa, Arabidopsis thaliana; identical to SEQ ID NO: 103579
  peptide (1)..(167): Ceres Seq. ID no. 13613083

SEQ ID NO: 114819 - DNA, 839 bp, Arabidopsis thaliana; identical to SEQ ID NO: 103580
  misc_feature (1)..(839): Ceres Seq. ID no. 13613106
  misc_feature (1)..(839): Ortholog of  Ceres SEQ ID NO 12557850 as cited in SEQ ID NO 65
  misc_feature (1)..(839): Ortholog of  Ceres SEQ ID NO 14312702 as cited in SEQ ID NO 0

SEQ ID NO: 114820 - protein, 191 aa, Arabidopsis thaliana; identical to SEQ ID NO: 21129
  peptide (1)..(191): Ceres Seq. ID no. 13613107

SEQ ID NO: 114821 - DNA, 1601 bp, Arabidopsis thaliana; identical to SEQ ID NO: 103582
  misc_feature (1)..(1601): Ceres Seq. ID no. 13613108
  misc_feature (1)..(1601): Ortholog of  Ceres SEQ ID NO 14315110 as cited in SEQ ID NO 55462
  misc_feature (1)..(1601): Ortholog of  Ceres SEQ ID NO 13596853 as cited in SEQ ID NO 62978

SEQ ID NO: 114822 - protein, 476 aa, Arabidopsis thaliana; identical to SEQ ID NO: 103583
  peptide (1)..(476): Ceres Seq. ID no. 13613109

SEQ ID NO: 114823 - protein, 436 aa, Arabidopsis thaliana; identical to SEQ ID NO: 42486
  peptide (1)..(436): Ceres Seq. ID no. 13613110

SEQ ID NO: 114824 - protein, 313 aa, Arabidopsis thaliana; identical to SEQ ID NO: 42487
  peptide (1)..(313): Ceres Seq. ID no. 13613111

SEQ ID NO: 114825 - DNA, 1883 bp, Arabidopsis thaliana; identical to SEQ ID NO: 103586
  misc_feature (1)..(1883): Ceres Seq. ID no. 13613112
  misc_feature (1)..(1883): Ortholog of  Ceres SEQ ID NO 15172472 as cited in SEQ ID NO 55361

SEQ ID NO: 114826 - protein, 521 aa, Arabidopsis thaliana; identical to SEQ ID NO: 37317
  peptide (1)..(521): Ceres Seq. ID no. 13613113

SEQ ID NO: 114827 - protein, 464 aa, Arabidopsis thaliana; identical to SEQ ID NO: 37318
  peptide (1)..(464): Ceres Seq. ID no. 13613114

SEQ ID NO: 114828 - protein, 391 aa, Arabidopsis thaliana; identical to SEQ ID NO: 37319
  peptide (1)..(391): Ceres Seq. ID no. 13613115

SEQ ID NO: 114829 - DNA, 1141 bp, Arabidopsis thaliana; identical to SEQ ID NO: 103590
  misc_feature (1)..(1141): Ceres Seq. ID no. 13613124
  misc_feature (1)..(1141): Ortholog of  Ceres SEQ ID NO 14314343 as cited in SEQ ID NO 57301

SEQ ID NO: 114830 - protein, 322 aa, Arabidopsis thaliana; identical to SEQ ID NO: 103591
  peptide (1)..(322): Ceres Seq. ID no. 13613125

SEQ ID NO: 114831 - protein, 302 aa, Arabidopsis thaliana; identical to SEQ ID NO: 103592
  peptide (1)..(302): Ceres Seq. ID no. 13613126

SEQ ID NO: 114832 - protein, 214 aa, Arabidopsis thaliana; identical to SEQ ID NO: 103593
  peptide (1)..(214): Ceres Seq. ID no. 13613127

SEQ ID NO: 114833 - DNA, 1322 bp, Arabidopsis thaliana; identical to SEQ ID NO: 103594
  misc_feature (1)..(1322): Ceres Seq. ID no. 13613128
  misc_feature (1)..(1322): Ortholog of  Ceres SEQ ID NO 13596474 as cited in SEQ ID NO 62169
  misc_feature (1)..(1322): Ortholog of  Ceres SEQ ID NO 13598714 as cited in SEQ ID NO 62656
  misc_feature (1)..(1322): Ortholog of  Ceres SEQ ID NO 13597519 as cited in SEQ ID NO 64759
  misc_feature (1)..(1322): Ortholog of  Ceres SEQ ID NO 13597870 as cited in SEQ ID NO 64982
  misc_feature (1)..(1322): Ortholog of  Ceres SEQ ID NO 13587054 as cited in SEQ ID NO 0

SEQ ID NO: 114834 - protein, 362 aa, Arabidopsis thaliana; identical to SEQ ID NO: 103595
  peptide (1)..(362): Ceres Seq. ID no. 13613129

SEQ ID NO: 114835 - protein, 350 aa, Arabidopsis thaliana; identical to SEQ ID NO: 30852
  peptide (1)..(350): Ceres Seq. ID no. 13613130

SEQ ID NO: 114836 - protein, 346 aa, Arabidopsis thaliana; identical to SEQ ID NO: 30853
  peptide (1)..(346): Ceres Seq. ID no. 13613131

SEQ ID NO: 114837 - DNA, 1510 bp, Arabidopsis thaliana; identical to SEQ ID NO: 103598
  misc_feature (1)..(1510): Ceres Seq. ID no. 13613136
  misc_feature (1)..(1510): Ortholog of  Ceres SEQ ID NO 14304502 as cited in SEQ ID NO 53212
  misc_feature (1)..(1510): Ortholog of  Ceres SEQ ID NO 15179323 as cited in SEQ ID NO 0

SEQ ID NO: 114838 - protein, 359 aa, Arabidopsis thaliana; identical to SEQ ID NO: 30404
  peptide (1)..(359): Ceres Seq. ID no. 13613137

SEQ ID NO: 114839 - protein, 238 aa, Arabidopsis thaliana; identical to SEQ ID NO: 30405
  peptide (1)..(238): Ceres Seq. ID no. 13613138

SEQ ID NO: 114840 - protein, 235 aa, Arabidopsis thaliana; identical to SEQ ID NO: 30406
  peptide (1)..(235): Ceres Seq. ID no. 13613139

SEQ ID NO: 114841 - DNA, 1383 bp, Arabidopsis thaliana; identical to SEQ ID NO: 103602
  misc_feature (1)..(1383): Ceres Seq. ID no. 13613149
  misc_feature (1)..(1383): Ortholog of  Ceres SEQ ID NO 12609528 as cited in SEQ ID NO 51902
  misc_feature (1)..(1383): Ortholog of  Ceres SEQ ID NO 12625248 as cited in SEQ ID NO 68797

SEQ ID NO: 114842 - protein, 300 aa, Arabidopsis thaliana; identical to SEQ ID NO: 74539
  peptide (1)..(300): Ceres Seq. ID no. 13613150

SEQ ID NO: 114843 - protein, 245 aa, Arabidopsis thaliana; identical to SEQ ID NO: 74540
  peptide (1)..(245): Ceres Seq. ID no. 13613151

SEQ ID NO: 114844 - protein, 242 aa, Arabidopsis thaliana; identical to SEQ ID NO: 74541
  peptide (1)..(242): Ceres Seq. ID no. 13613152

SEQ ID NO: 114845 - DNA, 1478 bp, Arabidopsis thaliana; identical to SEQ ID NO: 103606
  misc_feature (1)..(1478): Ceres Seq. ID no. 13613153
  misc_feature (1)..(1478): Ortholog of  Ceres SEQ ID NO 14303542 as cited in SEQ ID NO 63539
  misc_feature (1)..(1478): Ortholog of  Ceres SEQ ID NO 12407937 as cited in SEQ ID NO 0

SEQ ID NO: 114846 - protein, 387 aa, Arabidopsis thaliana; identical to SEQ ID NO: 21252
  peptide (1)..(387): Ceres Seq. ID no. 13613154

SEQ ID NO: 114847 - protein, 358 aa, Arabidopsis thaliana; identical to SEQ ID NO: 21253
  peptide (1)..(358): Ceres Seq. ID no. 13613155

SEQ ID NO: 114848 - protein, 348 aa, Arabidopsis thaliana; identical to SEQ ID NO: 21254
  peptide (1)..(348): Ceres Seq. ID no. 13613156

SEQ ID NO: 114849 - DNA, 1277 bp, Arabidopsis thaliana; identical to SEQ ID NO: 103610
  misc_feature (1)..(1277): Ceres Seq. ID no. 13613165
  misc_feature (1)..(1277): Ortholog of  Ceres SEQ ID NO 14315189 as cited in SEQ ID NO 57702

SEQ ID NO: 114850 - protein, 356 aa, Arabidopsis thaliana; identical to SEQ ID NO: 28085
  peptide (1)..(356): Ceres Seq. ID no. 13613166

SEQ ID NO: 114851 - protein, 321 aa, Arabidopsis thaliana; identical to SEQ ID NO: 28086
  peptide (1)..(321): Ceres Seq. ID no. 13613167

SEQ ID NO: 114852 - protein, 258 aa, Arabidopsis thaliana; identical to SEQ ID NO: 28087
  peptide (1)..(258): Ceres Seq. ID no. 13613168

SEQ ID NO: 114853 - DNA, 904 bp, Arabidopsis thaliana; identical to SEQ ID NO: 103614
  misc_feature (1)..(904): Ceres Seq. ID no. 13613169
  misc_feature (1)..(904): Ortholog of  Ceres SEQ ID NO 14301502 as cited in SEQ ID NO 61205

SEQ ID NO: 114854 - protein, 232 aa, Arabidopsis thaliana; identical to SEQ ID NO: 38345
  peptide (1)..(232): Ceres Seq. ID no. 13613170

SEQ ID NO: 114855 - protein, 225 aa, Arabidopsis thaliana; identical to SEQ ID NO: 38346
  peptide (1)..(225): Ceres Seq. ID no. 13613171

SEQ ID NO: 114856 - protein, 127 aa, Arabidopsis thaliana; identical to SEQ ID NO: 38347
  peptide (1)..(127): Ceres Seq. ID no. 13613172

SEQ ID NO: 114857 - DNA, 1195 bp, Arabidopsis thaliana; identical to SEQ ID NO: 103618
  misc_feature (1)..(1195): Ceres Seq. ID no. 13613183
  misc_feature (1)..(1195): Ortholog of  Ceres SEQ ID NO 14313893 as cited in SEQ ID NO 54646
  misc_feature (1)..(1195): Ortholog of  Ceres SEQ ID NO 13656797 as cited in SEQ ID NO 65756
  misc_feature (1)..(1195): Ortholog of  Ceres SEQ ID NO 13658498 as cited in SEQ ID NO 66557
  misc_feature (1)..(1195): Ortholog of  Ceres SEQ ID NO 15227053 as cited in SEQ ID NO 0

SEQ ID NO: 114858 - protein, 376 aa, Arabidopsis thaliana; identical to SEQ ID NO: 103619
  peptide (1)..(376): Ceres Seq. ID no. 13613184

SEQ ID NO: 114859 - protein, 367 aa, Arabidopsis thaliana; identical to SEQ ID NO: 103620
  peptide (1)..(367): Ceres Seq. ID no. 13613185

SEQ ID NO: 114860 - protein, 349 aa, Arabidopsis thaliana; identical to SEQ ID NO: 103621
  peptide (1)..(349): Ceres Seq. ID no. 13613186

SEQ ID NO: 114861 - DNA, 1326 bp, Arabidopsis thaliana; identical to SEQ ID NO: 103622
  misc_feature (1)..(1326): Ceres Seq. ID no. 13613187
  misc_feature (1)..(1326): Ortholog of  Ceres SEQ ID NO 15224520 as cited in SEQ ID NO 58188
  misc_feature (1)..(1326): Ortholog of  Ceres SEQ ID NO 12777206 as cited in SEQ ID NO 60246

SEQ ID NO: 114862 - protein, 321 aa, Arabidopsis thaliana; identical to SEQ ID NO: 21682
  peptide (1)..(321): Ceres Seq. ID no. 13613188

SEQ ID NO: 114863 - protein, 203 aa, Arabidopsis thaliana; identical to SEQ ID NO: 21683
  peptide (1)..(203): Ceres Seq. ID no. 13613189

SEQ ID NO: 114864 - protein, 183 aa, Arabidopsis thaliana; identical to SEQ ID NO: 21684
  peptide (1)..(183): Ceres Seq. ID no. 13613190

SEQ ID NO: 114865 - DNA, 1280 bp, Arabidopsis thaliana; identical to SEQ ID NO: 103626
  misc_feature (1)..(1280): Ceres Seq. ID no. 13613215
  misc_feature (1)..(1280): Ortholog of  Ceres SEQ ID NO 15172958 as cited in SEQ ID NO 51206
  misc_feature (1)..(1280): Ortholog of  Ceres SEQ ID NO 15171139 as cited in SEQ ID NO 60093
  misc_feature (1)..(1280): Ortholog of  Ceres SEQ ID NO 12634262 as cited in SEQ ID NO 0

SEQ ID NO: 114866 - protein, 373 aa, Arabidopsis thaliana; identical to SEQ ID NO: 103627
  peptide (1)..(373): Ceres Seq. ID no. 13613216

SEQ ID NO: 114867 - protein, 355 aa, Arabidopsis thaliana; identical to SEQ ID NO: 103628
  peptide (1)..(355): Ceres Seq. ID no. 13613217

SEQ ID NO: 114868 - protein, 334 aa, Arabidopsis thaliana; identical to SEQ ID NO: 103629
  peptide (1)..(334): Ceres Seq. ID no. 13613218

SEQ ID NO: 114869 - DNA, 1121 bp, Arabidopsis thaliana; identical to SEQ ID NO: 103630
  misc_feature (1)..(1121): Ceres Seq. ID no. 13613219
  misc_feature (1)..(1121): Ortholog of  Ceres SEQ ID NO 13504447 as cited in SEQ ID NO 57609

SEQ ID NO: 114870 - protein, 202 aa, Arabidopsis thaliana; identical to SEQ ID NO: 30212
  peptide (1)..(202): Ceres Seq. ID no. 13613220

SEQ ID NO: 114871 - DNA, 1134 bp, Arabidopsis thaliana; identical to SEQ ID NO: 103632
  misc_feature (1)..(1134): Ceres Seq. ID no. 13613221
  misc_feature (1)..(1134): Ortholog of  Ceres SEQ ID NO 12784064 as cited in SEQ ID NO 66982
  misc_feature (1)..(1134): Ortholog of  Ceres SEQ ID NO 15177907 as cited in SEQ ID NO 0

SEQ ID NO: 114872 - protein, 236 aa, Arabidopsis thaliana; identical to SEQ ID NO: 41212
  peptide (1)..(236): Ceres Seq. ID no. 13613222

SEQ ID NO: 114873 - DNA, 1070 bp, Arabidopsis thaliana; identical to SEQ ID NO: 103634
  misc_feature (1)..(1070): Ceres Seq. ID no. 13613227
  misc_feature (1)..(1070): Ortholog of  Ceres SEQ ID NO 15175425 as cited in SEQ ID NO 0

SEQ ID NO: 114874 - protein, 197 aa, Arabidopsis thaliana; identical to SEQ ID NO: 22729
  peptide (1)..(197): Ceres Seq. ID no. 13613228

SEQ ID NO: 114875 - DNA, 1188 bp, Arabidopsis thaliana; identical to SEQ ID NO: 103636
  misc_feature (1)..(1188): Ceres Seq. ID no. 13613231
  misc_feature (1)..(1188): Ortholog of  Ceres SEQ ID NO 12635446 as cited in SEQ ID NO 0

SEQ ID NO: 114876 - protein, 299 aa, Arabidopsis thaliana; identical to SEQ ID NO: 103637
  peptide (1)..(299): Ceres Seq. ID no. 13613232

SEQ ID NO: 114877 - DNA, 1696 bp, Arabidopsis thaliana; identical to SEQ ID NO: 103638
  misc_feature (1)..(1696): Ceres Seq. ID no. 13613239
  misc_feature (1)..(1696): Ortholog of  Ceres SEQ ID NO 15225553 as cited in SEQ ID NO 51170

SEQ ID NO: 114878 - protein, 488 aa, Arabidopsis thaliana; identical to SEQ ID NO: 23326
  peptide (1)..(488): Ceres Seq. ID no. 13613240

SEQ ID NO: 114879 - protein, 404 aa, Arabidopsis thaliana; identical to SEQ ID NO: 23327
  peptide (1)..(404): Ceres Seq. ID no. 13613241

SEQ ID NO: 114880 - protein, 403 aa, Arabidopsis thaliana; identical to SEQ ID NO: 23328
  peptide (1)..(403): Ceres Seq. ID no. 13613242

SEQ ID NO: 114881 - DNA, 1263 bp, Arabidopsis thaliana; identical to SEQ ID NO: 103642
  misc_feature (1)..(1263): Ceres Seq. ID no. 13613246
  misc_feature (1)..(1263): Ortholog of  Ceres SEQ ID NO 13581611 as cited in SEQ ID NO 59028
  misc_feature (1)..(1263): Ortholog of  Ceres SEQ ID NO 13596689 as cited in SEQ ID NO 62728

SEQ ID NO: 114882 - protein, 304 aa, Arabidopsis thaliana; identical to SEQ ID NO: 103643
  peptide (1)..(304): Ceres Seq. ID no. 13613247

SEQ ID NO: 114883 - protein, 288 aa, Arabidopsis thaliana; identical to SEQ ID NO: 103644
  peptide (1)..(288): Ceres Seq. ID no. 13613248

SEQ ID NO: 114884 - protein, 229 aa, Arabidopsis thaliana; identical to SEQ ID NO: 103645
  peptide (1)..(229): Ceres Seq. ID no. 13613249

SEQ ID NO: 114885 - DNA, 1136 bp, Arabidopsis thaliana; identical to SEQ ID NO: 103646
  misc_feature (1)..(1136): Ceres Seq. ID no. 13613258
  misc_feature (1)..(1136): Ortholog of  Ceres SEQ ID NO 13594828 as cited in SEQ ID NO 56431
  misc_feature (1)..(1136): Ortholog of  Ceres SEQ ID NO 14316363 as cited in SEQ ID NO 57222
  misc_feature (1)..(1136): Ortholog of  Ceres SEQ ID NO 15177754 as cited in SEQ ID NO 57945
  misc_feature (1)..(1136): Ortholog of  Ceres SEQ ID NO 13594354 as cited in SEQ ID NO 58082
  misc_feature (1)..(1136): Ortholog of  Ceres SEQ ID NO 14316408 as cited in SEQ ID NO 58228
  misc_feature (1)..(1136): Ortholog of  Ceres SEQ ID NO 13528075 as cited in SEQ ID NO 60188
  misc_feature (1)..(1136): Ortholog of  Ceres SEQ ID NO 13664389 as cited in SEQ ID NO 60564
  misc_feature (1)..(1136): Ortholog of  Ceres SEQ ID NO 13600483 as cited in SEQ ID NO 0

SEQ ID NO: 114886 - protein, 273 aa, Arabidopsis thaliana; identical to SEQ ID NO: 103647
  peptide (1)..(273): Ceres Seq. ID no. 13613259

SEQ ID NO: 114887 - protein, 192 aa, Arabidopsis thaliana; identical to SEQ ID NO: 103648
  peptide (1)..(192): Ceres Seq. ID no. 13613260

SEQ ID NO: 114888 - protein, 181 aa, Arabidopsis thaliana; identical to SEQ ID NO: 103649
  peptide (1)..(181): Ceres Seq. ID no. 13613261

SEQ ID NO: 114889 - DNA, 1260 bp, Arabidopsis thaliana; identical to SEQ ID NO: 103650
  misc_feature (1)..(1260): Ceres Seq. ID no. 13613274
  misc_feature (1)..(1260): Ortholog of  Ceres SEQ ID NO 13595509 as cited in SEQ ID NO 59833

SEQ ID NO: 114890 - protein, 303 aa, Arabidopsis thaliana [sequence omitted]

SEQ ID NO: 114891 - protein, 298 aa, Arabidopsis thaliana; identical to SEQ ID NO: 24145
  peptide (1)..(298): Ceres Seq. ID no. 13613276

SEQ ID NO: 114892 - protein, 168 aa, Arabidopsis thaliana; identical to SEQ ID NO: 24146
  peptide (1)..(168): Ceres Seq. ID no. 13613277

SEQ ID NO: 114893 - DNA, 2143 bp, Arabidopsis thaliana; identical to SEQ ID NO: 103654
  misc_feature (1)..(2143): Ceres Seq. ID no. 13613301
  misc_feature (1)..(2143): Ortholog of  Ceres SEQ ID NO 12613725 as cited in SEQ ID NO 68196

SEQ ID NO: 114894 - protein, 590 aa, Arabidopsis thaliana; identical to SEQ ID NO: 39905
  peptide (1)..(590): Ceres Seq. ID no. 13613302

SEQ ID NO: 114895 - protein, 540 aa, Arabidopsis thaliana; identical to SEQ ID NO: 39906
  peptide (1)..(540): Ceres Seq. ID no. 13613303

SEQ ID NO: 114896 - protein, 536 aa, Arabidopsis thaliana; identical to SEQ ID NO: 39907
  peptide (1)..(536): Ceres Seq. ID no. 13613304

SEQ ID NO: 114897 - DNA, 1237 bp, Arabidopsis thaliana; identical to SEQ ID NO: 103658
  misc_feature (1)..(1237): Ceres Seq. ID no. 13613305
  misc_feature (1)..(1237): Ortholog of  Ceres SEQ ID NO 15175700 as cited in SEQ ID NO 58584
  misc_feature (1)..(1237): Ortholog of  Ceres SEQ ID NO 13596474 as cited in SEQ ID NO 62169
  misc_feature (1)..(1237): Ortholog of  Ceres SEQ ID NO 13596969 as cited in SEQ ID NO 63375
  misc_feature (1)..(1237): Ortholog of  Ceres SEQ ID NO 13597519 as cited in SEQ ID NO 64759
  misc_feature (1)..(1237): Ortholog of  Ceres SEQ ID NO 13597870 as cited in SEQ ID NO 64982
  misc_feature (1)..(1237): Ortholog of  Ceres SEQ ID NO 13656123 as cited in SEQ ID NO 65212
  misc_feature (1)..(1237): Ortholog of  Ceres SEQ ID NO 13595926 as cited in SEQ ID NO 67778

SEQ ID NO: 114898 - protein, 329 aa, Arabidopsis thaliana; identical to SEQ ID NO: 103659
  peptide (1)..(329): Ceres Seq. ID no. 13613306

SEQ ID NO: 114899 - protein, 326 aa, Arabidopsis thaliana; identical to SEQ ID NO: 103660
  peptide (1)..(326): Ceres Seq. ID no. 13613307

SEQ ID NO: 114900 - protein, 309 aa, Arabidopsis thaliana; identical to SEQ ID NO: 103661
  peptide (1)..(309): Ceres Seq. ID no. 13613308

SEQ ID NO: 114901 - DNA, 1191 bp, Arabidopsis thaliana; identical to SEQ ID NO: 103662
  misc_feature (1)..(1191): Ceres Seq. ID no. 13613309
  misc_feature (1)..(1191): Ortholog of  Ceres SEQ ID NO 15227018 as cited in SEQ ID NO 0

SEQ ID NO: 114902 - protein, 343 aa, Arabidopsis thaliana; identical to SEQ ID NO: 103663
  peptide (1)..(343): Ceres Seq. ID no. 13613310

SEQ ID NO: 114903 - protein, 317 aa, Arabidopsis thaliana; identical to SEQ ID NO: 103664
  peptide (1)..(317): Ceres Seq. ID no. 13613311

SEQ ID NO: 114904 - protein, 297 aa, Arabidopsis thaliana; identical to SEQ ID NO: 103665
  peptide (1)..(297): Ceres Seq. ID no. 13613312

SEQ ID NO: 114905 - DNA, 1611 bp, Arabidopsis thaliana; identical to SEQ ID NO: 103666
  misc_feature (1)..(1611): Ceres Seq. ID no. 13613323
  misc_feature (1)..(1611): Ortholog of  Ceres SEQ ID NO 14303866 as cited in SEQ ID NO 53689
  misc_feature (1)..(1611): Ortholog of  Ceres SEQ ID NO 14315958 as cited in SEQ ID NO 59979
  misc_feature (1)..(1611): Ortholog of  Ceres SEQ ID NO 13597037 as cited in SEQ ID NO 69005

SEQ ID NO: 114906 - protein, 401 aa, Arabidopsis thaliana; identical to SEQ ID NO: 36705
  peptide (1)..(401): Ceres Seq. ID no. 13613324

SEQ ID NO: 114907 - protein, 328 aa, Arabidopsis thaliana; identical to SEQ ID NO: 36706
  peptide (1)..(328): Ceres Seq. ID no. 13613325

SEQ ID NO: 114908 - protein, 279 aa, Arabidopsis thaliana; identical to SEQ ID NO: 36707
  peptide (1)..(279): Ceres Seq. ID no. 13613326

SEQ ID NO: 114909 - DNA, 1478 bp, Arabidopsis thaliana; identical to SEQ ID NO: 103670
  misc_feature (1)..(1478): Ceres Seq. ID no. 13613331
  misc_feature (1)..(1478): Ortholog of  Ceres SEQ ID NO 13595142 as cited in SEQ ID NO 56671
  misc_feature (1)..(1478): Ortholog of  Ceres SEQ ID NO 15168569 as cited in SEQ ID NO 58123
  misc_feature (1)..(1478): Ortholog of  Ceres SEQ ID NO 15226382 as cited in SEQ ID NO 63295
  misc_feature (1)..(1478): Ortholog of  Ceres SEQ ID NO 13598460 as cited in SEQ ID NO 63382
  misc_feature (1)..(1478): Ortholog of  Ceres SEQ ID NO 13597403 as cited in SEQ ID NO 64085

SEQ ID NO: 114910 - protein, 408 aa, Arabidopsis thaliana; identical to SEQ ID NO: 28014
  peptide (1)..(408): Ceres Seq. ID no. 13613332

SEQ ID NO: 114911 - protein, 369 aa, Arabidopsis thaliana; identical to SEQ ID NO: 28015
  peptide (1)..(369): Ceres Seq. ID no. 13613333

SEQ ID NO: 114912 - protein, 311 aa, Arabidopsis thaliana; identical to SEQ ID NO: 28016
  peptide (1)..(311): Ceres Seq. ID no. 13613334

SEQ ID NO: 114913 - DNA, 1240 bp, Arabidopsis thaliana; identical to SEQ ID NO: 103674
  misc_feature (1)..(1240): Ceres Seq. ID no. 13613346
  misc_feature (1)..(1240): Ortholog of  Ceres SEQ ID NO 12609146 as cited in SEQ ID NO 52118
  misc_feature (1)..(1240): Ortholog of  Ceres SEQ ID NO 13594056 as cited in SEQ ID NO 55691
  misc_feature (1)..(1240): Ortholog of  Ceres SEQ ID NO 13638136 as cited in SEQ ID NO 58644
  misc_feature (1)..(1240): Ortholog of  Ceres SEQ ID NO 13596868 as cited in SEQ ID NO 62806
  misc_feature (1)..(1240): Ortholog of  Ceres SEQ ID NO 12587035 as cited in SEQ ID NO 63605
  misc_feature (1)..(1240): Ortholog of  Ceres SEQ ID NO 14301886 as cited in SEQ ID NO 64201
  misc_feature (1)..(1240): Ortholog of  Ceres SEQ ID NO 13595885 as cited in SEQ ID NO 69265
  misc_feature (1)..(1240): Ortholog of  Ceres SEQ ID NO 12566239 as cited in SEQ ID NO 0
  misc_feature (1)..(1240): Ortholog of  Ceres SEQ ID NO 13599119 as cited in SEQ ID NO 0
  misc_feature (1)..(1240): Ortholog of  Ceres SEQ ID NO 15179992 as cited in SEQ ID NO 0

SEQ ID NO: 114914 - protein, 375 aa, Arabidopsis thaliana; identical to SEQ ID NO: 23002
  peptide (1)..(375): Ceres Seq. ID no. 13613347

SEQ ID NO: 114915 - protein, 371 aa, Arabidopsis thaliana; identical to SEQ ID NO: 23003
  peptide (1)..(371): Ceres Seq. ID no. 13613348

SEQ ID NO: 114916 - protein, 276 aa, Arabidopsis thaliana; identical to SEQ ID NO: 23004
  peptide (1)..(276): Ceres Seq. ID no. 13613349

SEQ ID NO: 114917 - DNA, 2019 bp, Arabidopsis thaliana; identical to SEQ ID NO: 103678
  misc_feature (1)..(2019): Ceres Seq. ID no. 13613350
  misc_feature (1)..(2019): Ortholog of  Ceres SEQ ID NO 12593464 as cited in SEQ ID NO 69039

SEQ ID NO: 114918 - protein, 492 aa, Arabidopsis thaliana; identical to SEQ ID NO: 21893
  peptide (1)..(492): Ceres Seq. ID no. 13613351

SEQ ID NO: 114919 - protein, 464 aa, Arabidopsis thaliana; identical to SEQ ID NO: 21894
  peptide (1)..(464): Ceres Seq. ID no. 13613352

SEQ ID NO: 114920 - protein, 423 aa, Arabidopsis thaliana; identical to SEQ ID NO: 21895
  peptide (1)..(423): Ceres Seq. ID no. 13613353

SEQ ID NO: 114921 - DNA, 1090 bp, Arabidopsis thaliana; identical to SEQ ID NO: 103682
  misc_feature (1)..(1090): Ceres Seq. ID no. 13613358
  misc_feature (1)..(1090): Ortholog of  Ceres SEQ ID NO 13585461 as cited in SEQ ID NO 69106

SEQ ID NO: 114922 - protein, 271 aa, Arabidopsis thaliana; identical to SEQ ID NO: 103683
  peptide (1)..(271): Ceres Seq. ID no. 13613359

SEQ ID NO: 114923 - protein, 175 aa, Arabidopsis thaliana; identical to SEQ ID NO: 103684
  peptide (1)..(175): Ceres Seq. ID no. 13613360

SEQ ID NO: 114924 - DNA, 808 bp, Arabidopsis thaliana; identical to SEQ ID NO: 103685
  misc_feature (1)..(808): Ceres Seq. ID no. 13613361
  misc_feature (1)..(808): Ortholog of  Ceres SEQ ID NO 14308225 as cited in SEQ ID NO 59062
  misc_feature (1)..(808): Ortholog of  Ceres SEQ ID NO 15176615 as cited in SEQ ID NO 0

SEQ ID NO: 114925 - protein, 199 aa, Arabidopsis thaliana; identical to SEQ ID NO: 103686
  peptide (1)..(199): Ceres Seq. ID no. 13613362

SEQ ID NO: 114926 - protein, 197 aa, Arabidopsis thaliana; identical to SEQ ID NO: 103687
  peptide (1)..(197): Ceres Seq. ID no. 13613363

SEQ ID NO: 114927 - DNA, 1477 bp, Arabidopsis thaliana; identical to SEQ ID NO: 103688
  misc_feature (1)..(1477): Ceres Seq. ID no. 13613364
  misc_feature (1)..(1477): Ortholog of  Ceres SEQ ID NO 13595351 as cited in SEQ ID NO 55934
  misc_feature (1)..(1477): Ortholog of  Ceres SEQ ID NO 13595513 as cited in SEQ ID NO 56663
  misc_feature (1)..(1477): Ortholog of  Ceres SEQ ID NO 13639645 as cited in SEQ ID NO 57488

SEQ ID NO: 114928 - protein, 370 aa, Arabidopsis thaliana; identical to SEQ ID NO: 42641
  peptide (1)..(370): Ceres Seq. ID no. 13613365

SEQ ID NO: 114929 - protein, 365 aa, Arabidopsis thaliana; identical to SEQ ID NO: 42642
  peptide (1)..(365): Ceres Seq. ID no. 13613366

SEQ ID NO: 114930 - protein, 346 aa, Arabidopsis thaliana; identical to SEQ ID NO: 42643
  peptide (1)..(346): Ceres Seq. ID no. 13613367

SEQ ID NO: 114931 - DNA, 1149 bp, Arabidopsis thaliana; identical to SEQ ID NO: 103692
  misc_feature (1)..(1149): Ceres Seq. ID no. 13613368
  misc_feature (1)..(1149): Ortholog of  Ceres SEQ ID NO 13655404 as cited in SEQ ID NO 63283

SEQ ID NO: 114932 - protein, 334 aa, Arabidopsis thaliana; identical to SEQ ID NO: 103693
  peptide (1)..(334): Ceres Seq. ID no. 13613369

SEQ ID NO: 114933 - protein, 307 aa, Arabidopsis thaliana; identical to SEQ ID NO: 37872
  peptide (1)..(307): Ceres Seq. ID no. 13613370

SEQ ID NO: 114934 - protein, 245 aa, Arabidopsis thaliana; identical to SEQ ID NO: 37873
  peptide (1)..(245): Ceres Seq. ID no. 13613371

SEQ ID NO: 114935 - DNA, 1163 bp, Arabidopsis thaliana; identical to SEQ ID NO: 103696
  misc_feature (1)..(1163): Ceres Seq. ID no. 13613376
  misc_feature (1)..(1163): Ortholog of  Ceres SEQ ID NO 12618740 as cited in SEQ ID NO 65846
  misc_feature (1)..(1163): Ortholog of  Ceres SEQ ID NO 12635446 as cited in SEQ ID NO 0

SEQ ID NO: 114936 - protein, 203 aa, Arabidopsis thaliana; identical to SEQ ID NO: 26302
  peptide (1)..(203): Ceres Seq. ID no. 13613377

SEQ ID NO: 114937 - protein, 184 aa, Arabidopsis thaliana; identical to SEQ ID NO: 26303
  peptide (1)..(184): Ceres Seq. ID no. 13613378

SEQ ID NO: 114938 - DNA, 1361 bp, Arabidopsis thaliana; identical to SEQ ID NO: 103699
  misc_feature (1)..(1361): Ceres Seq. ID no. 13613379
  misc_feature (1)..(1361): Ortholog of  Ceres SEQ ID NO 12563124 as cited in SEQ ID NO 57104
  misc_feature (1)..(1361): Ortholog of  Ceres SEQ ID NO 13598373 as cited in SEQ ID NO 62185
  misc_feature (1)..(1361): Ortholog of  Ceres SEQ ID NO 12584664 as cited in SEQ ID NO 62232
  misc_feature (1)..(1361): Ortholog of  Ceres SEQ ID NO 12617639 as cited in SEQ ID NO 65219

SEQ ID NO: 114939 - protein, 110 aa, Arabidopsis thaliana; identical to SEQ ID NO: 22060
  peptide (1)..(110): Ceres Seq. ID no. 13613380

SEQ ID NO: 114940 - protein, 103 aa, Arabidopsis thaliana; identical to SEQ ID NO: 22061
  peptide (1)..(103): Ceres Seq. ID no. 13613381

SEQ ID NO: 114941 - DNA, 767 bp, Arabidopsis thaliana; identical to SEQ ID NO: 103702
  misc_feature (1)..(767): Ceres Seq. ID no. 13613385
  misc_feature (1)..(767): Ortholog of  Ceres SEQ ID NO 12563124 as cited in SEQ ID NO 57104
  misc_feature (1)..(767): Ortholog of  Ceres SEQ ID NO 13598373 as cited in SEQ ID NO 62185
  misc_feature (1)..(767): Ortholog of  Ceres SEQ ID NO 12584664 as cited in SEQ ID NO 62232
  misc_feature (1)..(767): Ortholog of  Ceres SEQ ID NO 12617639 as cited in SEQ ID NO 65219
  misc_feature (1)..(767): Ortholog of  Ceres SEQ ID NO 15179982 as cited in SEQ ID NO 0

SEQ ID NO: 114942 - protein, 169 aa, Arabidopsis thaliana; identical to SEQ ID NO: 22059
  peptide (1)..(169): Ceres Seq. ID no. 13613386

SEQ ID NO: 114943 - protein, 110 aa, Arabidopsis thaliana; identical to SEQ ID NO: 22060
  peptide (1)..(110): Ceres Seq. ID no. 13613387

SEQ ID NO: 114944 - protein, 103 aa, Arabidopsis thaliana; identical to SEQ ID NO: 22061
  peptide (1)..(103): Ceres Seq. ID no. 13613388

SEQ ID NO: 114945 - DNA, 686 bp, Arabidopsis thaliana; identical to SEQ ID NO: 103706
  misc_feature (1)..(686): Ceres Seq. ID no. 13613393
  misc_feature (1)..(686): Ortholog of  Ceres SEQ ID NO 12563124 as cited in SEQ ID NO 57104
  misc_feature (1)..(686): Ortholog of  Ceres SEQ ID NO 12617639 as cited in SEQ ID NO 65219
  misc_feature (1)..(686): Ortholog of  Ceres SEQ ID NO 15179982 as cited in SEQ ID NO 0

SEQ ID NO: 114946 - protein, 145 aa, Arabidopsis thaliana; identical to SEQ ID NO: 22120
  peptide (1)..(145): Ceres Seq. ID no. 13613394

SEQ ID NO: 114947 - protein, 86 aa, Arabidopsis thaliana; identical to SEQ ID NO: 22121
  peptide (1)..(86): Ceres Seq. ID no. 13613395

SEQ ID NO: 114948 - protein, 79 aa, Arabidopsis thaliana; identical to SEQ ID NO: 22122
  peptide (1)..(79): Ceres Seq. ID no. 13613396

SEQ ID NO: 114949 - DNA, 729 bp, Arabidopsis thaliana; identical to SEQ ID NO: 103710
  misc_feature (1)..(729): Ceres Seq. ID no. 13613397
  misc_feature (1)..(729): Ortholog of  Ceres SEQ ID NO 12563124 as cited in SEQ ID NO 57104
  misc_feature (1)..(729): Ortholog of  Ceres SEQ ID NO 12584664 as cited in SEQ ID NO 62232
  misc_feature (1)..(729): Ortholog of  Ceres SEQ ID NO 12617639 as cited in SEQ ID NO 65219
  misc_feature (1)..(729): Ortholog of  Ceres SEQ ID NO 15179982 as cited in SEQ ID NO 0

SEQ ID NO: 114950 - protein, 160 aa, Arabidopsis thaliana; identical to SEQ ID NO: 103711
  peptide (1)..(160): Ceres Seq. ID no. 13613398

SEQ ID NO: 114951 - protein, 101 aa, Arabidopsis thaliana; identical to SEQ ID NO: 36932
  peptide (1)..(101): Ceres Seq. ID no. 13613399

SEQ ID NO: 114952 - protein, 94 aa, Arabidopsis thaliana; identical to SEQ ID NO: 36933
  peptide (1)..(94): Ceres Seq. ID no. 13613400

SEQ ID NO: 114953 - DNA, 680 bp, Arabidopsis thaliana; identical to SEQ ID NO: 103714
  misc_feature (1)..(680): Ceres Seq. ID no. 13613401
  misc_feature (1)..(680): Ortholog of  Ceres SEQ ID NO 12563124 as cited in SEQ ID NO 57104
  misc_feature (1)..(680): Ortholog of  Ceres SEQ ID NO 12617639 as cited in SEQ ID NO 65219

SEQ ID NO: 114954 - protein, 143 aa, Arabidopsis thaliana; identical to SEQ ID NO: 103715
  peptide (1)..(143): Ceres Seq. ID no. 13613402

SEQ ID NO: 114955 - protein, 84 aa, Arabidopsis thaliana; identical to SEQ ID NO: 103716
  peptide (1)..(84): Ceres Seq. ID no. 13613403

SEQ ID NO: 114956 - protein, 77 aa, Arabidopsis thaliana; identical to SEQ ID NO: 103717
  peptide (1)..(77): Ceres Seq. ID no. 13613404

SEQ ID NO: 114957 - DNA, 698 bp, Arabidopsis thaliana; identical to SEQ ID NO: 103718
  misc_feature (1)..(698): Ceres Seq. ID no. 13613409
  misc_feature (1)..(698): Ortholog of  Ceres SEQ ID NO 12563124 as cited in SEQ ID NO 57104
  misc_feature (1)..(698): Ortholog of  Ceres SEQ ID NO 13598373 as cited in SEQ ID NO 62185
  misc_feature (1)..(698): Ortholog of  Ceres SEQ ID NO 12617639 as cited in SEQ ID NO 65219

SEQ ID NO: 114958 - protein, 128 aa, Arabidopsis thaliana; identical to SEQ ID NO: 44013
  peptide (1)..(128): Ceres Seq. ID no. 13613410

SEQ ID NO: 114959 - protein, 69 aa, Arabidopsis thaliana; identical to SEQ ID NO: 44014
  peptide (1)..(69): Ceres Seq. ID no. 13613411

SEQ ID NO: 114960 - DNA, 1592 bp, Arabidopsis thaliana; identical to SEQ ID NO: 103721
  misc_feature (1)..(1592): Ceres Seq. ID no. 13613412
  misc_feature (1)..(1592): Ortholog of  Ceres SEQ ID NO 15172560 as cited in SEQ ID NO 57325
  misc_feature (1)..(1592): Ortholog of  Ceres SEQ ID NO 13655716 as cited in SEQ ID NO 68965

SEQ ID NO: 114961 - protein, 388 aa, Arabidopsis thaliana; identical to SEQ ID NO: 75377
  peptide (1)..(388): Ceres Seq. ID no. 13613413

SEQ ID NO: 114962 - protein, 359 aa, Arabidopsis thaliana; identical to SEQ ID NO: 75378
  peptide (1)..(359): Ceres Seq. ID no. 13613414

SEQ ID NO: 114963 - protein, 278 aa, Arabidopsis thaliana; identical to SEQ ID NO: 75379
  peptide (1)..(278): Ceres Seq. ID no. 13613415

SEQ ID NO: 114964 - DNA, 1282 bp, Arabidopsis thaliana; identical to SEQ ID NO: 103725
  misc_feature (1)..(1282): Ceres Seq. ID no. 13613420
  misc_feature (1)..(1282): Ortholog of  Ceres SEQ ID NO 15177289 as cited in SEQ ID NO 59364

SEQ ID NO: 114965 - protein, 225 aa, Arabidopsis thaliana; identical to SEQ ID NO: 29620
  peptide (1)..(225): Ceres Seq. ID no. 13613421

SEQ ID NO: 114966 - protein, 114 aa, Arabidopsis thaliana; identical to SEQ ID NO: 29621
  peptide (1)..(114): Ceres Seq. ID no. 13613422

SEQ ID NO: 114967 - DNA, 723 bp, Arabidopsis thaliana; identical to SEQ ID NO: 103728
  misc_feature (1)..(723): Ceres Seq. ID no. 13613426
  misc_feature (1)..(723): Ortholog of  Ceres SEQ ID NO 12624105 as cited in SEQ ID NO 61361
  misc_feature (1)..(723): Ortholog of  Ceres SEQ ID NO 14309166 as cited in SEQ ID NO 0

SEQ ID NO: 114968 - protein, 175 aa, Arabidopsis thaliana; identical to SEQ ID NO: 30737
  peptide (1)..(175): Ceres Seq. ID no. 13613427

SEQ ID NO: 114969 - DNA, 1259 bp, Arabidopsis thaliana; identical to SEQ ID NO: 103730
  misc_feature (1)..(1259): Ceres Seq. ID no. 13613452
  misc_feature (1)..(1259): Ortholog of  Ceres SEQ ID NO 14307839 as cited in SEQ ID NO 54379
  misc_feature (1)..(1259): Ortholog of  Ceres SEQ ID NO 13596109 as cited in SEQ ID NO 68619

SEQ ID NO: 114970 - protein, 312 aa, Arabidopsis thaliana; identical to SEQ ID NO: 103731
  peptide (1)..(312): Ceres Seq. ID no. 13613453

SEQ ID NO: 114971 - protein, 274 aa, Arabidopsis thaliana; identical to SEQ ID NO: 103732
  peptide (1)..(274): Ceres Seq. ID no. 13613454

SEQ ID NO: 114972 - protein, 182 aa, Arabidopsis thaliana; identical to SEQ ID NO: 103733
  peptide (1)..(182): Ceres Seq. ID no. 13613455

SEQ ID NO: 114973 - DNA, 2040 bp, Arabidopsis thaliana; identical to SEQ ID NO: 103734
  misc_feature (1)..(2040): Ceres Seq. ID no. 13613456
  misc_feature (1)..(2040): Ortholog of  Ceres SEQ ID NO 15171040 as cited in SEQ ID NO 55332

SEQ ID NO: 114974 - protein, 577 aa, Arabidopsis thaliana; identical to SEQ ID NO: 103735
  peptide (1)..(577): Ceres Seq. ID no. 13613457

SEQ ID NO: 114975 - protein, 565 aa, Arabidopsis thaliana; identical to SEQ ID NO: 44131
  peptide (1)..(565): Ceres Seq. ID no. 13613458

SEQ ID NO: 114976 - DNA, 998 bp, Arabidopsis thaliana; identical to SEQ ID NO: 103737
  misc_feature (1)..(998): Ceres Seq. ID no. 13613467
  misc_feature (1)..(998): Ortholog of  Ceres SEQ ID NO 14309384 as cited in SEQ ID NO 52806
  misc_feature (1)..(998): Ortholog of  Ceres SEQ ID NO 14304136 as cited in SEQ ID NO 59024

SEQ ID NO: 114977 - protein, 284 aa, Arabidopsis thaliana; identical to SEQ ID NO: 103738
  peptide (1)..(284): Ceres Seq. ID no. 13613468

SEQ ID NO: 114978 - protein, 261 aa, Arabidopsis thaliana; identical to SEQ ID NO: 103739
  peptide (1)..(261): Ceres Seq. ID no. 13613469

SEQ ID NO: 114979 - protein, 229 aa, Arabidopsis thaliana; identical to SEQ ID NO: 103740
  peptide (1)..(229): Ceres Seq. ID no. 13613470

SEQ ID NO: 114980 - DNA, 784 bp, Arabidopsis thaliana; identical to SEQ ID NO: 103741
  misc_feature (1)..(784): Ceres Seq. ID no. 13613471
  misc_feature (1)..(784): Ortholog of  Ceres SEQ ID NO 13594411 as cited in SEQ ID NO 58223
  misc_feature (1)..(784): Ortholog of  Ceres SEQ ID NO 13661991 as cited in SEQ ID NO 61245

SEQ ID NO: 114981 - protein, 210 aa, Arabidopsis thaliana; identical to SEQ ID NO: 103742
  peptide (1)..(210): Ceres Seq. ID no. 13613472

SEQ ID NO: 114982 - protein, 193 aa, Arabidopsis thaliana; identical to SEQ ID NO: 103743
  peptide (1)..(193): Ceres Seq. ID no. 13613473

SEQ ID NO: 114983 - DNA, 2071 bp, Arabidopsis thaliana; identical to SEQ ID NO: 103744
  misc_feature (1)..(2071): Ceres Seq. ID no. 13613477
  misc_feature (1)..(2071): Ortholog of  Ceres SEQ ID NO 15176057 as cited in SEQ ID NO 56363
  misc_feature (1)..(2071): Ortholog of  Ceres SEQ ID NO 14316269 as cited in SEQ ID NO 60082

SEQ ID NO: 114984 - protein, 488 aa, Arabidopsis thaliana; identical to SEQ ID NO: 103745
  peptide (1)..(488): Ceres Seq. ID no. 13613478

SEQ ID NO: 114985 - protein, 440 aa, Arabidopsis thaliana; identical to SEQ ID NO: 27127
  peptide (1)..(440): Ceres Seq. ID no. 13613479

SEQ ID NO: 114986 - protein, 381 aa, Arabidopsis thaliana; identical to SEQ ID NO: 27128
  peptide (1)..(381): Ceres Seq. ID no. 13613480

SEQ ID NO: 114987 - DNA, 1255 bp, Arabidopsis thaliana; identical to SEQ ID NO: 103748
  misc_feature (1)..(1255): Ceres Seq. ID no. 13613485
  misc_feature (1)..(1255): Ortholog of  Ceres SEQ ID NO 13594117 as cited in SEQ ID NO 57050

SEQ ID NO: 114988 - protein, 275 aa, Arabidopsis thaliana; identical to SEQ ID NO: 103749
  peptide (1)..(275): Ceres Seq. ID no. 13613486

SEQ ID NO: 114989 - protein, 233 aa, Arabidopsis thaliana; identical to SEQ ID NO: 21299
  peptide (1)..(233): Ceres Seq. ID no. 13613487

SEQ ID NO: 114990 - protein, 140 aa, Arabidopsis thaliana; identical to SEQ ID NO: 21300
  peptide (1)..(140): Ceres Seq. ID no. 13613488

SEQ ID NO: 114991 - DNA, 901 bp, Arabidopsis thaliana; identical to SEQ ID NO: 103752
  misc_feature (1)..(901): Ceres Seq. ID no. 13613489
  misc_feature (1)..(901): Ortholog of  Ceres SEQ ID NO 13595808 as cited in SEQ ID NO 50995
  misc_feature (1)..(901): Ortholog of  Ceres SEQ ID NO 12609096 as cited in SEQ ID NO 52019
  misc_feature (1)..(901): Ortholog of  Ceres SEQ ID NO 15177207 as cited in SEQ ID NO 58287
  misc_feature (1)..(901): Ortholog of  Ceres SEQ ID NO 15178854 as cited in SEQ ID NO 0

SEQ ID NO: 114992 - protein, 264 aa, Arabidopsis thaliana; identical to SEQ ID NO: 26207
  peptide (1)..(264): Ceres Seq. ID no. 13613490

SEQ ID NO: 114993 - protein, 246 aa, Arabidopsis thaliana; identical to SEQ ID NO: 26208
  peptide (1)..(246): Ceres Seq. ID no. 13613491

SEQ ID NO: 114994 - protein, 139 aa, Arabidopsis thaliana; identical to SEQ ID NO: 26209
  peptide (1)..(139): Ceres Seq. ID no. 13613492

SEQ ID NO: 114995 - DNA, 1310 bp, Arabidopsis thaliana; identical to SEQ ID NO: 103756
  misc_feature (1)..(1310): Ceres Seq. ID no. 13613497
  misc_feature (1)..(1310): Ortholog of  Ceres SEQ ID NO 14302021 as cited in SEQ ID NO 68979
  misc_feature (1)..(1310): Ortholog of  Ceres SEQ ID NO 14309296 as cited in SEQ ID NO 0

SEQ ID NO: 114996 - protein, 310 aa, Arabidopsis thaliana; identical to SEQ ID NO: 27615
  peptide (1)..(310): Ceres Seq. ID no. 13613498

SEQ ID NO: 114997 - protein, 176 aa, Arabidopsis thaliana; identical to SEQ ID NO: 27616
  peptide (1)..(176): Ceres Seq. ID no. 13613499

SEQ ID NO: 114998 - DNA, 1641 bp, Arabidopsis thaliana; identical to SEQ ID NO: 103759
  misc_feature (1)..(1641): Ceres Seq. ID no. 13613500
  misc_feature (1)..(1641): Ortholog of  Ceres SEQ ID NO 13596816 as cited in SEQ ID NO 62287

SEQ ID NO: 114999 - protein, 479 aa, Arabidopsis thaliana; identical to SEQ ID NO: 103760
  peptide (1)..(479): Ceres Seq. ID no. 13613501

SEQ ID NO: 115000 - protein, 449 aa, Arabidopsis thaliana; identical to SEQ ID NO: 28203
  peptide (1)..(449): Ceres Seq. ID no. 13613502

SEQ ID NO: 115001 - protein, 320 aa, Arabidopsis thaliana; identical to SEQ ID NO: 28204
  peptide (1)..(320): Ceres Seq. ID no. 13613503

SEQ ID NO: 115002 - DNA, 1392 bp, Arabidopsis thaliana; identical to SEQ ID NO: 103763
  misc_feature (1)..(1392): Ceres Seq. ID no. 13613511
  misc_feature (1)..(1392): Ortholog of  Ceres SEQ ID NO 14315418 as cited in SEQ ID NO 57506

SEQ ID NO: 115003 - protein, 332 aa, Arabidopsis thaliana; identical to SEQ ID NO: 36967
  peptide (1)..(332): Ceres Seq. ID no. 13613512

SEQ ID NO: 115004 - protein, 330 aa, Arabidopsis thaliana; identical to SEQ ID NO: 36968
  peptide (1)..(330): Ceres Seq. ID no. 13613513

SEQ ID NO: 115005 - protein, 266 aa, Arabidopsis thaliana; identical to SEQ ID NO: 36969
  peptide (1)..(266): Ceres Seq. ID no. 13613514

SEQ ID NO: 115006 - DNA, 1271 bp, Arabidopsis thaliana; identical to SEQ ID NO: 103767
  misc_feature (1)..(1271): Ceres Seq. ID no. 13613515
  misc_feature (1)..(1271): Ortholog of  Ceres SEQ ID NO 15224418 as cited in SEQ ID NO 51528
  misc_feature (1)..(1271): Ortholog of  Ceres SEQ ID NO 13593846 as cited in SEQ ID NO 53152
  misc_feature (1)..(1271): Ortholog of  Ceres SEQ ID NO 12781936 as cited in SEQ ID NO 56320
  misc_feature (1)..(1271): Ortholog of  Ceres SEQ ID NO 13659489 as cited in SEQ ID NO 66986
  misc_feature (1)..(1271): Ortholog of  Ceres SEQ ID NO 15175169 as cited in SEQ ID NO 0

SEQ ID NO: 115007 - protein, 275 aa, Arabidopsis thaliana; identical to SEQ ID NO: 43356
  peptide (1)..(275): Ceres Seq. ID no. 13613516

SEQ ID NO: 115008 - protein, 233 aa, Arabidopsis thaliana; identical to SEQ ID NO: 43357
  peptide (1)..(233): Ceres Seq. ID no. 13613517

SEQ ID NO: 115009 - protein, 176 aa, Arabidopsis thaliana; identical to SEQ ID NO: 43358
  peptide (1)..(176): Ceres Seq. ID no. 13613518

SEQ ID NO: 115010 - DNA, 1723 bp, Arabidopsis thaliana; identical to SEQ ID NO: 103771
  misc_feature (1)..(1723): Ceres Seq. ID no. 13613523
  misc_feature (1)..(1723): Ortholog of  Ceres SEQ ID NO 15177285 as cited in SEQ ID NO 52481
  misc_feature (1)..(1723): Ortholog of  Ceres SEQ ID NO 13594068 as cited in SEQ ID NO 58624

SEQ ID NO: 115011 - protein, 442 aa, Arabidopsis thaliana; identical to SEQ ID NO: 40259
  peptide (1)..(442): Ceres Seq. ID no. 13613524

SEQ ID NO: 115012 - protein, 383 aa, Arabidopsis thaliana; identical to SEQ ID NO: 40260
  peptide (1)..(383): Ceres Seq. ID no. 13613525

SEQ ID NO: 115013 - protein, 317 aa, Arabidopsis thaliana; identical to SEQ ID NO: 24809
  peptide (1)..(317): Ceres Seq. ID no. 13613526

SEQ ID NO: 115014 - DNA, 1151 bp, Arabidopsis thaliana; identical to SEQ ID NO: 103775
  misc_feature (1)..(1151): Ceres Seq. ID no. 13613535
  misc_feature (1)..(1151): Ortholog of  Ceres SEQ ID NO 14302351 as cited in SEQ ID NO 66690

SEQ ID NO: 115015 - protein, 216 aa, Arabidopsis thaliana; identical to SEQ ID NO: 103776
  peptide (1)..(216): Ceres Seq. ID no. 13613536

SEQ ID NO: 115016 - protein, 209 aa, Arabidopsis thaliana; identical to SEQ ID NO: 40232
  peptide (1)..(209): Ceres Seq. ID no. 13613537

SEQ ID NO: 115017 - protein, 179 aa, Arabidopsis thaliana; identical to SEQ ID NO: 40233
  peptide (1)..(179): Ceres Seq. ID no. 13613538

SEQ ID NO: 115018 - DNA, 780 bp, Arabidopsis thaliana; identical to SEQ ID NO: 103779
  misc_feature (1)..(780): Ceres Seq. ID no. 13613539
  misc_feature (1)..(780): Ortholog of  Ceres SEQ ID NO 15173990 as cited in SEQ ID NO 1070
  misc_feature (1)..(780): Ortholog of  Ceres SEQ ID NO 13594900 as cited in SEQ ID NO 52042

SEQ ID NO: 115019 - protein, 130 aa, Arabidopsis thaliana; identical to SEQ ID NO: 29995
  peptide (1)..(130): Ceres Seq. ID no. 13613540

SEQ ID NO: 115020 - protein, 71 aa, Arabidopsis thaliana; identical to SEQ ID NO: 29996
  peptide (1)..(71): Ceres Seq. ID no. 13613541

SEQ ID NO: 115021 - protein, 70 aa, Arabidopsis thaliana; identical to SEQ ID NO: 29997
  peptide (1)..(70): Ceres Seq. ID no. 13613542

SEQ ID NO: 115022 - DNA, 1507 bp, Arabidopsis thaliana; identical to SEQ ID NO: 103783
  misc_feature (1)..(1507): Ceres Seq. ID no. 13613543
  misc_feature (1)..(1507): Ortholog of  Ceres SEQ ID NO 15177652 as cited in SEQ ID NO 56858
  misc_feature (1)..(1507): Ortholog of  Ceres SEQ ID NO 13597162 as cited in SEQ ID NO 63955

SEQ ID NO: 115023 - protein, 452 aa, Arabidopsis thaliana; identical to SEQ ID NO: 103784
  peptide (1)..(452): Ceres Seq. ID no. 13613544

SEQ ID NO: 115024 - protein, 433 aa, Arabidopsis thaliana; identical to SEQ ID NO: 39300
  peptide (1)..(433): Ceres Seq. ID no. 13613545

SEQ ID NO: 115025 - protein, 235 aa, Arabidopsis thaliana; identical to SEQ ID NO: 39301
  peptide (1)..(235): Ceres Seq. ID no. 13613546

SEQ ID NO: 115026 - DNA, 1602 bp, Arabidopsis thaliana; identical to SEQ ID NO: 103787
  misc_feature (1)..(1602): Ceres Seq. ID no. 13613549
  misc_feature (1)..(1602): Ortholog of  Ceres SEQ ID NO 13659033 as cited in SEQ ID NO 66372
  misc_feature (1)..(1602): Ortholog of  Ceres SEQ ID NO 13655724 as cited in SEQ ID NO 68973
  misc_feature (1)..(1602): Ortholog of  Ceres SEQ ID NO 12625899 as cited in SEQ ID NO 69079

SEQ ID NO: 115027 - protein, 425 aa, Arabidopsis thaliana; identical to SEQ ID NO: 103788
  peptide (1)..(425): Ceres Seq. ID no. 13613550

SEQ ID NO: 115028 - protein, 383 aa, Arabidopsis thaliana; identical to SEQ ID NO: 103789
  peptide (1)..(383): Ceres Seq. ID no. 13613551

SEQ ID NO: 115029 - protein, 284 aa, Arabidopsis thaliana; identical to SEQ ID NO: 103790
  peptide (1)..(284): Ceres Seq. ID no. 13613552

SEQ ID NO: 115030 - DNA, 1383 bp, Arabidopsis thaliana; identical to SEQ ID NO: 103791
  misc_feature (1)..(1383): Ceres Seq. ID no. 13613553
  misc_feature (1)..(1383): Ortholog of  Ceres SEQ ID NO 15175597 as cited in SEQ ID NO 58317

SEQ ID NO: 115031 - protein, 341 aa, Arabidopsis thaliana; identical to SEQ ID NO: 103792
  peptide (1)..(341): Ceres Seq. ID no. 13613554

SEQ ID NO: 115032 - protein, 283 aa, Arabidopsis thaliana; identical to SEQ ID NO: 103793
  peptide (1)..(283): Ceres Seq. ID no. 13613555

SEQ ID NO: 115033 - DNA, 907 bp, Arabidopsis thaliana; identical to SEQ ID NO: 103794
  misc_feature (1)..(907): Ceres Seq. ID no. 13613560
  misc_feature (1)..(907): Ortholog of  Ceres SEQ ID NO 15178260 as cited in SEQ ID NO 59907

SEQ ID NO: 115034 - protein, 224 aa, Arabidopsis thaliana; identical to SEQ ID NO: 38408
  peptide (1)..(224): Ceres Seq. ID no. 13613561

SEQ ID NO: 115035 - protein, 199 aa, Arabidopsis thaliana; identical to SEQ ID NO: 38409
  peptide (1)..(199): Ceres Seq. ID no. 13613562

SEQ ID NO: 115036 - protein, 192 aa, Arabidopsis thaliana; identical to SEQ ID NO: 38410
  peptide (1)..(192): Ceres Seq. ID no. 13613563

SEQ ID NO: 115037 - DNA, 1252 bp, Arabidopsis thaliana; identical to SEQ ID NO: 103798
  misc_feature (1)..(1252): Ceres Seq. ID no. 13613591
  misc_feature (1)..(1252): Ortholog of  Ceres SEQ ID NO 15180036 as cited in SEQ ID NO 0

SEQ ID NO: 115038 - protein, 389 aa, Arabidopsis thaliana; identical to SEQ ID NO: 103799
  peptide (1)..(389): Ceres Seq. ID no. 13613592

SEQ ID NO: 115039 - protein, 351 aa, Arabidopsis thaliana; identical to SEQ ID NO: 103800
  peptide (1)..(351): Ceres Seq. ID no. 13613593

SEQ ID NO: 115040 - protein, 311 aa, Arabidopsis thaliana; identical to SEQ ID NO: 103801
  peptide (1)..(311): Ceres Seq. ID no. 13613594

SEQ ID NO: 115041 - DNA, 605 bp, Arabidopsis thaliana; identical to SEQ ID NO: 103802
  misc_feature (1)..(605): Ceres Seq. ID no. 13613603
  misc_feature (1)..(605): Ortholog of  Ceres SEQ ID NO 13594809 as cited in SEQ ID NO 51847
  misc_feature (1)..(605): Ortholog of  Ceres SEQ ID NO 12563124 as cited in SEQ ID NO 57104

SEQ ID NO: 115042 - protein, 118 aa, Arabidopsis thaliana; identical to SEQ ID NO: 40864
  peptide (1)..(118): Ceres Seq. ID no. 13613604

SEQ ID NO: 115043 - protein, 59 aa, Arabidopsis thaliana; identical to SEQ ID NO: 40865
  peptide (1)..(59): Ceres Seq. ID no. 13613605

SEQ ID NO: 115044 - DNA, 592 bp, Arabidopsis thaliana; identical to SEQ ID NO: 103805
  misc_feature (1)..(592): Ceres Seq. ID no. 13613606
  misc_feature (1)..(592): Ortholog of  Ceres SEQ ID NO 12563124 as cited in SEQ ID NO 57104
  misc_feature (1)..(592): Ortholog of  Ceres SEQ ID NO 12617639 as cited in SEQ ID NO 65219

SEQ ID NO: 115045 - protein, 131 aa, Arabidopsis thaliana; identical to SEQ ID NO: 20905
  peptide (1)..(131): Ceres Seq. ID no. 13613607

SEQ ID NO: 115046 - protein, 72 aa, Arabidopsis thaliana; identical to SEQ ID NO: 20906
  peptide (1)..(72): Ceres Seq. ID no. 13613608

SEQ ID NO: 115047 - protein, 65 aa, Arabidopsis thaliana; identical to SEQ ID NO: 20907
  peptide (1)..(65): Ceres Seq. ID no. 13613609

SEQ ID NO: 115048 - DNA, 591 bp, Arabidopsis thaliana; identical to SEQ ID NO: 103809
  misc_feature (1)..(591): Ceres Seq. ID no. 13613610
  misc_feature (1)..(591): Ortholog of  Ceres SEQ ID NO 12563124 as cited in SEQ ID NO 57104

SEQ ID NO: 115049 - protein, 118 aa, Arabidopsis thaliana; identical to SEQ ID NO: 103810
  peptide (1)..(118): Ceres Seq. ID no. 13613611

SEQ ID NO: 115050 - protein, 59 aa, Arabidopsis thaliana; identical to SEQ ID NO: 39123
  peptide (1)..(59): Ceres Seq. ID no. 13613612

SEQ ID NO: 115051 - DNA, 554 bp, Arabidopsis thaliana; identical to SEQ ID NO: 103812
  misc_feature (1)..(554): Ceres Seq. ID no. 13613613
  misc_feature (1)..(554): Ortholog of  Ceres SEQ ID NO 12563124 as cited in SEQ ID NO 57104

SEQ ID NO: 115052 - protein, 101 aa, Arabidopsis thaliana; identical to SEQ ID NO: 103813
  peptide (1)..(101): Ceres Seq. ID no. 13613614

SEQ ID NO: 115053 - DNA, 1251 bp, Arabidopsis thaliana; identical to SEQ ID NO: 103814
  misc_feature (1)..(1251): Ceres Seq. ID no. 13613615
  misc_feature (1)..(1251): Ortholog of  Ceres SEQ ID NO 13596108 as cited in SEQ ID NO 68591

SEQ ID NO: 115054 - protein, 361 aa, Arabidopsis thaliana; identical to SEQ ID NO: 22114
  peptide (1)..(361): Ceres Seq. ID no. 13613616

SEQ ID NO: 115055 - protein, 325 aa, Arabidopsis thaliana; identical to SEQ ID NO: 22115
  peptide (1)..(325): Ceres Seq. ID no. 13613617

SEQ ID NO: 115056 - protein, 301 aa, Arabidopsis thaliana; identical to SEQ ID NO: 22116
  peptide (1)..(301): Ceres Seq. ID no. 13613618

SEQ ID NO: 115057 - DNA, 1366 bp, Arabidopsis thaliana; identical to SEQ ID NO: 103818
  misc_feature (1)..(1366): Ceres Seq. ID no. 13613635
  misc_feature (1)..(1366): Ortholog of  Ceres SEQ ID NO 14305026 as cited in SEQ ID NO 52980
  misc_feature (1)..(1366): Ortholog of  Ceres SEQ ID NO 15175670 as cited in SEQ ID NO 55204
  misc_feature (1)..(1366): Ortholog of  Ceres SEQ ID NO 13595598 as cited in SEQ ID NO 56822

SEQ ID NO: 115058 - protein, 294 aa, Arabidopsis thaliana; identical to SEQ ID NO: 38954
  peptide (1)..(294): Ceres Seq. ID no. 13613636

SEQ ID NO: 115059 - protein, 285 aa, Arabidopsis thaliana; identical to SEQ ID NO: 38955
  peptide (1)..(285): Ceres Seq. ID no. 13613637

SEQ ID NO: 115060 - protein, 262 aa, Arabidopsis thaliana; identical to SEQ ID NO: 38956
  peptide (1)..(262): Ceres Seq. ID no. 13613638

SEQ ID NO: 115061 - DNA, 1289 bp, Arabidopsis thaliana; identical to SEQ ID NO: 103822
  misc_feature (1)..(1289): Ceres Seq. ID no. 13613656
  misc_feature (1)..(1289): Ortholog of  Ceres SEQ ID NO 12615296 as cited in SEQ ID NO 62724
  misc_feature (1)..(1289): Ortholog of  Ceres SEQ ID NO 15225093 as cited in SEQ ID NO 65177
  misc_feature (1)..(1289): Ortholog of  Ceres SEQ ID NO 15179532 as cited in SEQ ID NO 0

SEQ ID NO: 115062 - protein, 331 aa, Arabidopsis thaliana; identical to SEQ ID NO: 103823
  peptide (1)..(331): Ceres Seq. ID no. 13613657

SEQ ID NO: 115063 - protein, 288 aa, Arabidopsis thaliana; identical to SEQ ID NO: 30417
  peptide (1)..(288): Ceres Seq. ID no. 13613658

SEQ ID NO: 115064 - protein, 220 aa, Arabidopsis thaliana; identical to SEQ ID NO: 30418
  peptide (1)..(220): Ceres Seq. ID no. 13613659

SEQ ID NO: 115065 - DNA, 1596 bp, Arabidopsis thaliana; identical to SEQ ID NO: 103826
  misc_feature (1)..(1596): Ceres Seq. ID no. 13613670
  misc_feature (1)..(1596): Ortholog of  Ceres SEQ ID NO 13663060 as cited in SEQ ID NO 60964
  misc_feature (1)..(1596): Ortholog of  Ceres SEQ ID NO 13655298 as cited in SEQ ID NO 68914

SEQ ID NO: 115066 - protein, 407 aa, Arabidopsis thaliana; identical to SEQ ID NO: 30700
  peptide (1)..(407): Ceres Seq. ID no. 13613671

SEQ ID NO: 115067 - protein, 371 aa, Arabidopsis thaliana; identical to SEQ ID NO: 30701
  peptide (1)..(371): Ceres Seq. ID no. 13613672

SEQ ID NO: 115068 - protein, 337 aa, Arabidopsis thaliana; identical to SEQ ID NO: 30702
  peptide (1)..(337): Ceres Seq. ID no. 13613673

SEQ ID NO: 115069 - DNA, 785 bp, Arabidopsis thaliana; identical to SEQ ID NO: 103830
  misc_feature (1)..(785): Ceres Seq. ID no. 13613674
  misc_feature (1)..(785): Ortholog of  Ceres SEQ ID NO 13596131 as cited in SEQ ID NO 67838

SEQ ID NO: 115070 - protein, 182 aa, Arabidopsis thaliana; identical to SEQ ID NO: 37793
  peptide (1)..(182): Ceres Seq. ID no. 13613675

SEQ ID NO: 115071 - protein, 133 aa, Arabidopsis thaliana; identical to SEQ ID NO: 37794
  peptide (1)..(133): Ceres Seq. ID no. 13613676

SEQ ID NO: 115072 - protein, 98 aa, Arabidopsis thaliana; identical to SEQ ID NO: 37795
  peptide (1)..(98): Ceres Seq. ID no. 13613677

SEQ ID NO: 115073 - DNA, 1090 bp, Arabidopsis thaliana; identical to SEQ ID NO: 103834
  misc_feature (1)..(1090): Ceres Seq. ID no. 13613678
  misc_feature (1)..(1090): Ortholog of  Ceres SEQ ID NO 13595414 as cited in SEQ ID NO 56539

SEQ ID NO: 115074 - protein, 290 aa, Arabidopsis thaliana; identical to SEQ ID NO: 103835
  peptide (1)..(290): Ceres Seq. ID no. 13613679

SEQ ID NO: 115075 - protein, 239 aa, Arabidopsis thaliana; identical to SEQ ID NO: 103836
  peptide (1)..(239): Ceres Seq. ID no. 13613680

SEQ ID NO: 115076 - protein, 228 aa, Arabidopsis thaliana; identical to SEQ ID NO: 103837
  peptide (1)..(228): Ceres Seq. ID no. 13613681

SEQ ID NO: 115077 - DNA, 1709 bp, Arabidopsis thaliana; identical to SEQ ID NO: 103838
  misc_feature (1)..(1709): Ceres Seq. ID no. 13613693
  misc_feature (1)..(1709): Ortholog of  Ceres SEQ ID NO 14307257 as cited in SEQ ID NO 54628

SEQ ID NO: 115078 - protein, 485 aa, Arabidopsis thaliana; identical to SEQ ID NO: 24657
  peptide (1)..(485): Ceres Seq. ID no. 13613694

SEQ ID NO: 115079 - protein, 397 aa, Arabidopsis thaliana; identical to SEQ ID NO: 24658
  peptide (1)..(397): Ceres Seq. ID no. 13613695

SEQ ID NO: 115080 - protein, 377 aa, Arabidopsis thaliana; identical to SEQ ID NO: 24659
  peptide (1)..(377): Ceres Seq. ID no. 13613696

SEQ ID NO: 115081 - DNA, 1290 bp, Arabidopsis thaliana; identical to SEQ ID NO: 103842
  misc_feature (1)..(1290): Ceres Seq. ID no. 13613697
  misc_feature (1)..(1290): Ortholog of  Ceres SEQ ID NO 13593955 as cited in SEQ ID NO 54278
  misc_feature (1)..(1290): Ortholog of  Ceres SEQ ID NO 13597380 as cited in SEQ ID NO 64054
  misc_feature (1)..(1290): Ortholog of  Ceres SEQ ID NO 12625474 as cited in SEQ ID NO 64169
  misc_feature (1)..(1290): Ortholog of  Ceres SEQ ID NO 13597502 as cited in SEQ ID NO 64681

SEQ ID NO: 115082 - protein, 360 aa, Arabidopsis thaliana; identical to SEQ ID NO: 103843
  peptide (1)..(360): Ceres Seq. ID no. 13613698

SEQ ID NO: 115083 - protein, 219 aa, Arabidopsis thaliana; identical to SEQ ID NO: 103844
  peptide (1)..(219): Ceres Seq. ID no. 13613699

SEQ ID NO: 115084 - protein, 201 aa, Arabidopsis thaliana; identical to SEQ ID NO: 103845
  peptide (1)..(201): Ceres Seq. ID no. 13613700

SEQ ID NO: 115085 - DNA, 1747 bp, Arabidopsis thaliana; identical to SEQ ID NO: 103846
  misc_feature (1)..(1747): Ceres Seq. ID no. 13613701
  misc_feature (1)..(1747): Ortholog of  Ceres SEQ ID NO 15179918 as cited in SEQ ID NO 57077

SEQ ID NO: 115086 - protein, 543 aa, Arabidopsis thaliana; identical to SEQ ID NO: 27102
  peptide (1)..(543): Ceres Seq. ID no. 13613702

SEQ ID NO: 115087 - protein, 531 aa, Arabidopsis thaliana; identical to SEQ ID NO: 27103
  peptide (1)..(531): Ceres Seq. ID no. 13613703

SEQ ID NO: 115088 - protein, 364 aa, Arabidopsis thaliana; identical to SEQ ID NO: 27104
  peptide (1)..(364): Ceres Seq. ID no. 13613704

SEQ ID NO: 115089 - DNA, 1437 bp, Arabidopsis thaliana; identical to SEQ ID NO: 103850
  misc_feature (1)..(1437): Ceres Seq. ID no. 13613709
  misc_feature (1)..(1437): Ortholog of  Ceres SEQ ID NO 12625831 as cited in SEQ ID NO 65139

SEQ ID NO: 115090 - protein, 381 aa, Arabidopsis thaliana; identical to SEQ ID NO: 42684
  peptide (1)..(381): Ceres Seq. ID no. 13613710

SEQ ID NO: 115091 - protein, 331 aa, Arabidopsis thaliana; identical to SEQ ID NO: 42685
  peptide (1)..(331): Ceres Seq. ID no. 13613711

SEQ ID NO: 115092 - protein, 319 aa, Arabidopsis thaliana; identical to SEQ ID NO: 42686
  peptide (1)..(319): Ceres Seq. ID no. 13613712

SEQ ID NO: 115093 - DNA, 1564 bp, Arabidopsis thaliana; identical to SEQ ID NO: 103854
  misc_feature (1)..(1564): Ceres Seq. ID no. 13613723
  misc_feature (1)..(1564): Ortholog of  Ceres SEQ ID NO 13597574 as cited in SEQ ID NO 64677
  misc_feature (1)..(1564): Ortholog of  Ceres SEQ ID NO 13662880 as cited in SEQ ID NO 65422
  misc_feature (1)..(1564): Ortholog of  Ceres SEQ ID NO 14302071 as cited in SEQ ID NO 66585
  misc_feature (1)..(1564): Ortholog of  Ceres SEQ ID NO 14316013 as cited in SEQ ID NO 67181
  misc_feature (1)..(1564): Ortholog of  Ceres SEQ ID NO 12779098 as cited in SEQ ID NO 67698
  misc_feature (1)..(1564): Ortholog of  Ceres SEQ ID NO 13596180 as cited in SEQ ID NO 67941
  misc_feature (1)..(1564): Ortholog of  Ceres SEQ ID NO 13591190 as cited in SEQ ID NO 68044
  misc_feature (1)..(1564): Ortholog of  Ceres SEQ ID NO 13596089 as cited in SEQ ID NO 68373

SEQ ID NO: 115094 - protein, 489 aa, Arabidopsis thaliana; identical to SEQ ID NO: 103855
  peptide (1)..(489): Ceres Seq. ID no. 13613724

SEQ ID NO: 115095 - protein, 460 aa, Arabidopsis thaliana; identical to SEQ ID NO: 103856
  peptide (1)..(460): Ceres Seq. ID no. 13613725

SEQ ID NO: 115096 - protein, 450 aa, Arabidopsis thaliana; identical to SEQ ID NO: 103857
  peptide (1)..(450): Ceres Seq. ID no. 13613726

SEQ ID NO: 115097 - DNA, 1467 bp, Arabidopsis thaliana; identical to SEQ ID NO: 103858
  misc_feature (1)..(1467): Ceres Seq. ID no. 13613727
  misc_feature (1)..(1467): Ortholog of  Ceres SEQ ID NO 15172093 as cited in SEQ ID NO 54938

SEQ ID NO: 115098 - protein, 442 aa, Arabidopsis thaliana; identical to SEQ ID NO: 103859
  peptide (1)..(442): Ceres Seq. ID no. 13613728

SEQ ID NO: 115099 - protein, 428 aa, Arabidopsis thaliana; identical to SEQ ID NO: 42619
  peptide (1)..(428): Ceres Seq. ID no. 13613729

SEQ ID NO: 115100 - protein, 419 aa, Arabidopsis thaliana; identical to SEQ ID NO: 42620
  peptide (1)..(419): Ceres Seq. ID no. 13613730

SEQ ID NO: 115101 - DNA, 938 bp, Arabidopsis thaliana; identical to SEQ ID NO: 103862
  misc_feature (1)..(938): Ceres Seq. ID no. 13613731
  misc_feature (1)..(938): Ortholog of  Ceres SEQ ID NO 14306682 as cited in SEQ ID NO 53140

SEQ ID NO: 115102 - protein, 201 aa, Arabidopsis thaliana; identical to SEQ ID NO: 49510
  peptide (1)..(201): Ceres Seq. ID no. 13613732

SEQ ID NO: 115103 - DNA, 843 bp, Arabidopsis thaliana; identical to SEQ ID NO: 103864
  misc_feature (1)..(843): Ceres Seq. ID no. 13613733
  misc_feature (1)..(843): Ortholog of  Ceres SEQ ID NO 15171235 as cited in SEQ ID NO 52469
  misc_feature (1)..(843): Ortholog of  Ceres SEQ ID NO 15178542 as cited in SEQ ID NO 65410
  misc_feature (1)..(843): Ortholog of  Ceres SEQ ID NO 15174852 as cited in SEQ ID NO 67166
  misc_feature (1)..(843): Ortholog of  Ceres SEQ ID NO 12635657 as cited in SEQ ID NO 0
  misc_feature (1)..(843): Ortholog of  Ceres SEQ ID NO 12635879 as cited in SEQ ID NO 0
  misc_feature (1)..(843): Ortholog of  Ceres SEQ ID NO 13599649 as cited in SEQ ID NO 0

SEQ ID NO: 115104 - protein, 176 aa, Arabidopsis thaliana; identical to SEQ ID NO: 29035
  peptide (1)..(176): Ceres Seq. ID no. 13613734

SEQ ID NO: 115105 - protein, 162 aa, Arabidopsis thaliana; identical to SEQ ID NO: 29036
  peptide (1)..(162): Ceres Seq. ID no. 13613735

SEQ ID NO: 115106 - protein, 155 aa, Arabidopsis thaliana; identical to SEQ ID NO: 29037
  peptide (1)..(155): Ceres Seq. ID no. 13613736

SEQ ID NO: 115107 - DNA, 1905 bp, Arabidopsis thaliana; identical to SEQ ID NO: 103868
  misc_feature (1)..(1905): Ceres Seq. ID no. 13613759
  misc_feature (1)..(1905): Ortholog of  Ceres SEQ ID NO 15169264 as cited in SEQ ID NO 55026
  misc_feature (1)..(1905): Ortholog of  Ceres SEQ ID NO 15224709 as cited in SEQ ID NO 68627

SEQ ID NO: 115108 - protein, 600 aa, Arabidopsis thaliana; identical to SEQ ID NO: 103869
  peptide (1)..(600): Ceres Seq. ID no. 13613760

SEQ ID NO: 115109 - protein, 585 aa, Arabidopsis thaliana; identical to SEQ ID NO: 103870
  peptide (1)..(585): Ceres Seq. ID no. 13613761

SEQ ID NO: 115110 - protein, 455 aa, Arabidopsis thaliana; identical to SEQ ID NO: 103871
  peptide (1)..(455): Ceres Seq. ID no. 13613762

SEQ ID NO: 115111 - DNA, 1230 bp, Arabidopsis thaliana; identical to SEQ ID NO: 103872
  misc_feature (1)..(1230): Ceres Seq. ID no. 13613771
  misc_feature (1)..(1230): Ortholog of  Ceres SEQ ID NO 13593955 as cited in SEQ ID NO 54278
  misc_feature (1)..(1230): Ortholog of  Ceres SEQ ID NO 13655302 as cited in SEQ ID NO 63307
  misc_feature (1)..(1230): Ortholog of  Ceres SEQ ID NO 13597380 as cited in SEQ ID NO 64054
  misc_feature (1)..(1230): Ortholog of  Ceres SEQ ID NO 12625474 as cited in SEQ ID NO 64169
  misc_feature (1)..(1230): Ortholog of  Ceres SEQ ID NO 13597502 as cited in SEQ ID NO 64681

SEQ ID NO: 115112 - protein, 362 aa, Arabidopsis thaliana; identical to SEQ ID NO: 103873
  peptide (1)..(362): Ceres Seq. ID no. 13613772

SEQ ID NO: 115113 - protein, 360 aa, Arabidopsis thaliana; identical to SEQ ID NO: 103874
  peptide (1)..(360): Ceres Seq. ID no. 13613773

SEQ ID NO: 115114 - protein, 352 aa, Arabidopsis thaliana; identical to SEQ ID NO: 103875
  peptide (1)..(352): Ceres Seq. ID no. 13613774

SEQ ID NO: 115115 - DNA, 1817 bp, Arabidopsis thaliana; identical to SEQ ID NO: 103876
  misc_feature (1)..(1817): Ceres Seq. ID no. 13613793
  misc_feature (1)..(1817): Ortholog of  Ceres SEQ ID NO 12609146 as cited in SEQ ID NO 52118
  misc_feature (1)..(1817): Ortholog of  Ceres SEQ ID NO 13638136 as cited in SEQ ID NO 58644
  misc_feature (1)..(1817): Ortholog of  Ceres SEQ ID NO 14302836 as cited in SEQ ID NO 65013

SEQ ID NO: 115116 - protein, 442 aa, Arabidopsis thaliana; identical to SEQ ID NO: 41036
  peptide (1)..(442): Ceres Seq. ID no. 13613794

SEQ ID NO: 115117 - protein, 410 aa, Arabidopsis thaliana; identical to SEQ ID NO: 41037
  peptide (1)..(410): Ceres Seq. ID no. 13613795

SEQ ID NO: 115118 - protein, 405 aa, Arabidopsis thaliana; identical to SEQ ID NO: 41038
  peptide (1)..(405): Ceres Seq. ID no. 13613796

SEQ ID NO: 115119 - DNA, 1538 bp, Arabidopsis thaliana; identical to SEQ ID NO: 103880
  misc_feature (1)..(1538): Ceres Seq. ID no. 13613797
  misc_feature (1)..(1538): Ortholog of  Ceres SEQ ID NO 15168521 as cited in SEQ ID NO 58180

SEQ ID NO: 115120 - protein, 331 aa, Arabidopsis thaliana; identical to SEQ ID NO: 103881
  peptide (1)..(331): Ceres Seq. ID no. 13613798

SEQ ID NO: 115121 - protein, 275 aa, Arabidopsis thaliana; identical to SEQ ID NO: 20921
  peptide (1)..(275): Ceres Seq. ID no. 13613799

SEQ ID NO: 115122 - protein, 271 aa, Arabidopsis thaliana; identical to SEQ ID NO: 20922
  peptide (1)..(271): Ceres Seq. ID no. 13613800

SEQ ID NO: 115123 - DNA, 729 bp, Arabidopsis thaliana; identical to SEQ ID NO: 103884
  misc_feature (1)..(729): Ceres Seq. ID no. 13613801
  misc_feature (1)..(729): Ortholog of  Ceres SEQ ID NO 15174264 as cited in SEQ ID NO 61877

SEQ ID NO: 115124 - protein, 148 aa, Arabidopsis thaliana; identical to SEQ ID NO: 28124
  peptide (1)..(148): Ceres Seq. ID no. 13613802

SEQ ID NO: 115125 - protein, 91 aa, Arabidopsis thaliana; identical to SEQ ID NO: 28125
  peptide (1)..(91): Ceres Seq. ID no. 13613803

SEQ ID NO: 115126 - DNA, 829 bp, Arabidopsis thaliana; identical to SEQ ID NO: 103887
  misc_feature (1)..(829): Ceres Seq. ID no. 13613804
  misc_feature (1)..(829): Ortholog of  Ceres SEQ ID NO 13594220 as cited in SEQ ID NO 57121
  misc_feature (1)..(829): Ortholog of  Ceres SEQ ID NO 12638425 as cited in SEQ ID NO 0

SEQ ID NO: 115127 - protein, 144 aa, Arabidopsis thaliana; identical to SEQ ID NO: 35600
  peptide (1)..(144): Ceres Seq. ID no. 13613805

SEQ ID NO: 115128 - DNA, 851 bp, Arabidopsis thaliana; identical to SEQ ID NO: 103889
  misc_feature (1)..(851): Ceres Seq. ID no. 13613810
  misc_feature (1)..(851): Ortholog of  Ceres SEQ ID NO 14309686 as cited in SEQ ID NO 58523

SEQ ID NO: 115129 - protein, 146 aa, Arabidopsis thaliana; identical to SEQ ID NO: 29677
  peptide (1)..(146): Ceres Seq. ID no. 13613811

SEQ ID NO: 115130 - protein, 136 aa, Arabidopsis thaliana; identical to SEQ ID NO: 29678
  peptide (1)..(136): Ceres Seq. ID no. 13613812

SEQ ID NO: 115131 - protein, 75 aa, Arabidopsis thaliana; identical to SEQ ID NO: 29679
  peptide (1)..(75): Ceres Seq. ID no. 13613813

SEQ ID NO: 115132 - DNA, 1085 bp, Arabidopsis thaliana; identical to SEQ ID NO: 103893
  misc_feature (1)..(1085): Ceres Seq. ID no. 13613814
  misc_feature (1)..(1085): Ortholog of  Ceres SEQ ID NO 12617391 as cited in SEQ ID NO 64114
  misc_feature (1)..(1085): Ortholog of  Ceres SEQ ID NO 13595922 as cited in SEQ ID NO 69293
  misc_feature (1)..(1085): Ortholog of  Ceres SEQ ID NO 12635496 as cited in SEQ ID NO 0

SEQ ID NO: 115133 - protein, 277 aa, Arabidopsis thaliana; identical to SEQ ID NO: 103894
  peptide (1)..(277): Ceres Seq. ID no. 13613815

SEQ ID NO: 115134 - protein, 221 aa, Arabidopsis thaliana; identical to SEQ ID NO: 75103
  peptide (1)..(221): Ceres Seq. ID no. 13613816

SEQ ID NO: 115135 - protein, 215 aa, Arabidopsis thaliana; identical to SEQ ID NO: 75104
  peptide (1)..(215): Ceres Seq. ID no. 13613817

SEQ ID NO: 115136 - DNA, 719 bp, Arabidopsis thaliana; identical to SEQ ID NO: 103897
  misc_feature (1)..(719): Ceres Seq. ID no. 13613829
  misc_feature (1)..(719): Ortholog of  Ceres SEQ ID NO 12612272 as cited in SEQ ID NO 55946

SEQ ID NO: 115137 - protein, 155 aa, Arabidopsis thaliana; identical to SEQ ID NO: 103898
  peptide (1)..(155): Ceres Seq. ID no. 13613830

SEQ ID NO: 115138 - protein, 91 aa, Arabidopsis thaliana; identical to SEQ ID NO: 103899
  peptide (1)..(91): Ceres Seq. ID no. 13613831

SEQ ID NO: 115139 - protein, 90 aa, Arabidopsis thaliana; identical to SEQ ID NO: 22187
  peptide (1)..(90): Ceres Seq. ID no. 13613832

SEQ ID NO: 115140 - DNA, 1972 bp, Arabidopsis thaliana; identical to SEQ ID NO: 103901
  misc_feature (1)..(1972): Ceres Seq. ID no. 13613837
  misc_feature (1)..(1972): Ortholog of  Ceres SEQ ID NO 13590904 as cited in SEQ ID NO 66072

SEQ ID NO: 115141 - protein, 601 aa, Arabidopsis thaliana; identical to SEQ ID NO: 103902
  peptide (1)..(601): Ceres Seq. ID no. 13613838

SEQ ID NO: 115142 - protein, 578 aa, Arabidopsis thaliana; identical to SEQ ID NO: 22942
  peptide (1)..(578): Ceres Seq. ID no. 13613839

SEQ ID NO: 115143 - protein, 480 aa, Arabidopsis thaliana; identical to SEQ ID NO: 22943
  peptide (1)..(480): Ceres Seq. ID no. 13613840

SEQ ID NO: 115144 - DNA, 1794 bp, Arabidopsis thaliana; identical to SEQ ID NO: 103905
  misc_feature (1)..(1794): Ceres Seq. ID no. 13613851
  misc_feature (1)..(1794): Ortholog of  Ceres SEQ ID NO 14313943 as cited in SEQ ID NO 54725
  misc_feature (1)..(1794): Ortholog of  Ceres SEQ ID NO 14309674 as cited in SEQ ID NO 55707
  misc_feature (1)..(1794): Ortholog of  Ceres SEQ ID NO 13658728 as cited in SEQ ID NO 66270
  misc_feature (1)..(1794): Ortholog of  Ceres SEQ ID NO 12465428 as cited in SEQ ID NO 68898

SEQ ID NO: 115145 - protein, 511 aa, Arabidopsis thaliana; identical to SEQ ID NO: 103906
  peptide (1)..(511): Ceres Seq. ID no. 13613852

SEQ ID NO: 115146 - protein, 491 aa, Arabidopsis thaliana; identical to SEQ ID NO: 35372
  peptide (1)..(491): Ceres Seq. ID no. 13613853

SEQ ID NO: 115147 - protein, 489 aa, Arabidopsis thaliana; identical to SEQ ID NO: 35373
  peptide (1)..(489): Ceres Seq. ID no. 13613854

SEQ ID NO: 115148 - DNA, 1460 bp, Arabidopsis thaliana; identical to SEQ ID NO: 103909
  misc_feature (1)..(1460): Ceres Seq. ID no. 13613867
  misc_feature (1)..(1460): Ortholog of  Ceres SEQ ID NO 15168537 as cited in SEQ ID NO 57100
  misc_feature (1)..(1460): Ortholog of  Ceres SEQ ID NO 15178681 as cited in SEQ ID NO 63192
  misc_feature (1)..(1460): Ortholog of  Ceres SEQ ID NO 13579918 as cited in SEQ ID NO 64644
  misc_feature (1)..(1460): Ortholog of  Ceres SEQ ID NO 13654122 as cited in SEQ ID NO 68192

SEQ ID NO: 115149 - protein, 425 aa, Arabidopsis thaliana; identical to SEQ ID NO: 103910
  peptide (1)..(425): Ceres Seq. ID no. 13613868

SEQ ID NO: 115150 - protein, 389 aa, Arabidopsis thaliana; identical to SEQ ID NO: 29956
  peptide (1)..(389): Ceres Seq. ID no. 13613869

SEQ ID NO: 115151 - protein, 309 aa, Arabidopsis thaliana; identical to SEQ ID NO: 103912
  peptide (1)..(309): Ceres Seq. ID no. 13613870

SEQ ID NO: 115152 - DNA, 1329 bp, Arabidopsis thaliana; identical to SEQ ID NO: 103913
  misc_feature (1)..(1329): Ceres Seq. ID no. 13613882
  misc_feature (1)..(1329): Ortholog of  Ceres SEQ ID NO 12564952 as cited in SEQ ID NO 63211

SEQ ID NO: 115153 - protein, 400 aa, Arabidopsis thaliana; identical to SEQ ID NO: 103914
  peptide (1)..(400): Ceres Seq. ID no. 13613883

SEQ ID NO: 115154 - protein, 371 aa, Arabidopsis thaliana; identical to SEQ ID NO: 103915
  peptide (1)..(371): Ceres Seq. ID no. 13613884

SEQ ID NO: 115155 - protein, 361 aa, Arabidopsis thaliana; identical to SEQ ID NO: 103916
  peptide (1)..(361): Ceres Seq. ID no. 13613885

SEQ ID NO: 115156 - DNA, 1459 bp, Arabidopsis thaliana; identical to SEQ ID NO: 103917
  misc_feature (1)..(1459): Ceres Seq. ID no. 13613886
  misc_feature (1)..(1459): Ortholog of  Ceres SEQ ID NO 13594168 as cited in SEQ ID NO 59043

SEQ ID NO: 115157 - protein, 287 aa, Arabidopsis thaliana; identical to SEQ ID NO: 103918
  peptide (1)..(287): Ceres Seq. ID no. 13613887

SEQ ID NO: 115158 - protein, 257 aa, Arabidopsis thaliana; identical to SEQ ID NO: 103919
  peptide (1)..(257): Ceres Seq. ID no. 13613888

SEQ ID NO: 115159 - protein, 248 aa, Arabidopsis thaliana; identical to SEQ ID NO: 103920
  peptide (1)..(248): Ceres Seq. ID no. 13613889

SEQ ID NO: 115160 - DNA, 1648 bp, Arabidopsis thaliana; identical to SEQ ID NO: 103921
  misc_feature (1)..(1648): Ceres Seq. ID no. 13613901
  misc_feature (1)..(1648): Ortholog of  Ceres SEQ ID NO 14301413 as cited in SEQ ID NO 53524

SEQ ID NO: 115161 - protein, 444 aa, Arabidopsis thaliana; identical to SEQ ID NO: 103922
  peptide (1)..(444): Ceres Seq. ID no. 13613902

SEQ ID NO: 115162 - protein, 400 aa, Arabidopsis thaliana; identical to SEQ ID NO: 103923
  peptide (1)..(400): Ceres Seq. ID no. 13613903

SEQ ID NO: 115163 - protein, 395 aa, Arabidopsis thaliana; identical to SEQ ID NO: 103924
  peptide (1)..(395): Ceres Seq. ID no. 13613904

SEQ ID NO: 115164 - DNA, 708 bp, Arabidopsis thaliana; identical to SEQ ID NO: 103925
  misc_feature (1)..(708): Ceres Seq. ID no. 13613905
  misc_feature (1)..(708): Ortholog of  Ceres SEQ ID NO 13587227 as cited in SEQ ID NO 513
  misc_feature (1)..(708): Ortholog of  Ceres SEQ ID NO 13594494 as cited in SEQ ID NO 51293
  misc_feature (1)..(708): Ortholog of  Ceres SEQ ID NO 13595538 as cited in SEQ ID NO 59858
  misc_feature (1)..(708): Ortholog of  Ceres SEQ ID NO 12598249 as cited in SEQ ID NO 61073
  misc_feature (1)..(708): Ortholog of  Ceres SEQ ID NO 13582815 as cited in SEQ ID NO 68106

SEQ ID NO: 115165 - protein, 176 aa, Arabidopsis thaliana; identical to SEQ ID NO: 103926
  peptide (1)..(176): Ceres Seq. ID no. 13613906

SEQ ID NO: 115166 - DNA, 1464 bp, Arabidopsis thaliana; identical to SEQ ID NO: 103927
  misc_feature (1)..(1464): Ceres Seq. ID no. 13613911
  misc_feature (1)..(1464): Ortholog of  Ceres SEQ ID NO 13542155 as cited in SEQ ID NO 64236

SEQ ID NO: 115167 - protein, 419 aa, Arabidopsis thaliana; identical to SEQ ID NO: 103928
  peptide (1)..(419): Ceres Seq. ID no. 13613912

SEQ ID NO: 115168 - protein, 411 aa, Arabidopsis thaliana; identical to SEQ ID NO: 103929
  peptide (1)..(411): Ceres Seq. ID no. 13613913

SEQ ID NO: 115169 - protein, 355 aa, Arabidopsis thaliana; identical to SEQ ID NO: 103930
  peptide (1)..(355): Ceres Seq. ID no. 13613914

SEQ ID NO: 115170 - DNA, 970 bp, Arabidopsis thaliana; identical to SEQ ID NO: 103931
  misc_feature (1)..(970): Ceres Seq. ID no. 13613919
  misc_feature (1)..(970): Ortholog of  Ceres SEQ ID NO 12618205 as cited in SEQ ID NO 65153

SEQ ID NO: 115171 - protein, 240 aa, Arabidopsis thaliana; identical to SEQ ID NO: 21608
  peptide (1)..(240): Ceres Seq. ID no. 13613920

SEQ ID NO: 115172 - DNA, 956 bp, Arabidopsis thaliana; identical to SEQ ID NO: 103933
  misc_feature (1)..(956): Ceres Seq. ID no. 13613921
  misc_feature (1)..(956): Ortholog of  Ceres SEQ ID NO 13593920 as cited in SEQ ID NO 54151
  misc_feature (1)..(956): Ortholog of  Ceres SEQ ID NO 15225313 as cited in SEQ ID NO 58628

SEQ ID NO: 115173 - protein, 242 aa, Arabidopsis thaliana; identical to SEQ ID NO: 103934
  peptide (1)..(242): Ceres Seq. ID no. 13613922

SEQ ID NO: 115174 - protein, 232 aa, Arabidopsis thaliana; identical to SEQ ID NO: 41609
  peptide (1)..(232): Ceres Seq. ID no. 13613923

SEQ ID NO: 115175 - protein, 186 aa, Arabidopsis thaliana; identical to SEQ ID NO: 41610
  peptide (1)..(186): Ceres Seq. ID no. 13613924

SEQ ID NO: 115176 - DNA, 1809 bp, Arabidopsis thaliana; identical to SEQ ID NO: 103937
  misc_feature (1)..(1809): Ceres Seq. ID no. 13613929
  misc_feature (1)..(1809): Ortholog of  Ceres SEQ ID NO 14307831 as cited in SEQ ID NO 54732

SEQ ID NO: 115177 - protein, 531 aa, Arabidopsis thaliana; identical to SEQ ID NO: 103938
  peptide (1)..(531): Ceres Seq. ID no. 13613930

SEQ ID NO: 115178 - protein, 515 aa, Arabidopsis thaliana; identical to SEQ ID NO: 36464
  peptide (1)..(515): Ceres Seq. ID no. 13613931

SEQ ID NO: 115179 - protein, 419 aa, Arabidopsis thaliana; identical to SEQ ID NO: 36465
  peptide (1)..(419): Ceres Seq. ID no. 13613932

SEQ ID NO: 115180 - DNA, 1102 bp, Arabidopsis thaliana; identical to SEQ ID NO: 103941
  misc_feature (1)..(1102): Ceres Seq. ID no. 13613933
  misc_feature (1)..(1102): Ortholog of  Ceres SEQ ID NO 14316043 as cited in SEQ ID NO 68538
  misc_feature (1)..(1102): Ortholog of  Ceres SEQ ID NO 14309361 as cited in SEQ ID NO 0

SEQ ID NO: 115181 - protein, 321 aa, Arabidopsis thaliana; identical to SEQ ID NO: 103942
  peptide (1)..(321): Ceres Seq. ID no. 13613934

SEQ ID NO: 115182 - protein, 214 aa, Arabidopsis thaliana; identical to SEQ ID NO: 103943
  peptide (1)..(214): Ceres Seq. ID no. 13613935

SEQ ID NO: 115183 - DNA, 1322 bp, Arabidopsis thaliana; identical to SEQ ID NO: 103944
  misc_feature (1)..(1322): Ceres Seq. ID no. 13613943
  misc_feature (1)..(1322): Ortholog of  Ceres SEQ ID NO 12364737 as cited in SEQ ID NO 51089
  misc_feature (1)..(1322): Ortholog of  Ceres SEQ ID NO 13594147 as cited in SEQ ID NO 58975
  misc_feature (1)..(1322): Ortholog of  Ceres SEQ ID NO 13597380 as cited in SEQ ID NO 64054
  misc_feature (1)..(1322): Ortholog of  Ceres SEQ ID NO 12625474 as cited in SEQ ID NO 64169

SEQ ID NO: 115184 - protein, 348 aa, Arabidopsis thaliana; identical to SEQ ID NO: 35198
  peptide (1)..(348): Ceres Seq. ID no. 13613944

SEQ ID NO: 115185 - protein, 224 aa, Arabidopsis thaliana; identical to SEQ ID NO: 35199
  peptide (1)..(224): Ceres Seq. ID no. 13613945

SEQ ID NO: 115186 - DNA, 1145 bp, Arabidopsis thaliana; identical to SEQ ID NO: 103947
  misc_feature (1)..(1145): Ceres Seq. ID no. 13613946
  misc_feature (1)..(1145): Ortholog of  Ceres SEQ ID NO 14311671 as cited in SEQ ID NO 51251
  misc_feature (1)..(1145): Ortholog of  Ceres SEQ ID NO 14304791 as cited in SEQ ID NO 53562
  misc_feature (1)..(1145): Ortholog of  Ceres SEQ ID NO 14307355 as cited in SEQ ID NO 54610
  misc_feature (1)..(1145): Ortholog of  Ceres SEQ ID NO 13594298 as cited in SEQ ID NO 57803
  misc_feature (1)..(1145): Ortholog of  Ceres SEQ ID NO 13503476 as cited in SEQ ID NO 61978
  misc_feature (1)..(1145): Ortholog of  Ceres SEQ ID NO 12578438 as cited in SEQ ID NO 62201
  misc_feature (1)..(1145): Ortholog of  Ceres SEQ ID NO 12617675 as cited in SEQ ID NO 64656

SEQ ID NO: 115187 - protein, 298 aa, Arabidopsis thaliana; identical to SEQ ID NO: 103948
  peptide (1)..(298): Ceres Seq. ID no. 13613947

SEQ ID NO: 115188 - protein, 269 aa, Arabidopsis thaliana; identical to SEQ ID NO: 21034
  peptide (1)..(269): Ceres Seq. ID no. 13613948

SEQ ID NO: 115189 - protein, 199 aa, Arabidopsis thaliana; identical to SEQ ID NO: 21035
  peptide (1)..(199): Ceres Seq. ID no. 13613949

SEQ ID NO: 115190 - DNA, 1124 bp, Arabidopsis thaliana; identical to SEQ ID NO: 103951
  misc_feature (1)..(1124): Ceres Seq. ID no. 13613954
  misc_feature (1)..(1124): Ortholog of  Ceres SEQ ID NO 15177991 as cited in SEQ ID NO 53915
  misc_feature (1)..(1124): Ortholog of  Ceres SEQ ID NO 15174347 as cited in SEQ ID NO 58577
  misc_feature (1)..(1124): Ortholog of  Ceres SEQ ID NO 13596609 as cited in SEQ ID NO 63070
  misc_feature (1)..(1124): Ortholog of  Ceres SEQ ID NO 12616895 as cited in SEQ ID NO 63909
  misc_feature (1)..(1124): Ortholog of  Ceres SEQ ID NO 13598574 as cited in SEQ ID NO 69083

SEQ ID NO: 115191 - protein, 291 aa, Arabidopsis thaliana; identical to SEQ ID NO: 103952
  peptide (1)..(291): Ceres Seq. ID no. 13613955

SEQ ID NO: 115192 - protein, 272 aa, Arabidopsis thaliana; identical to SEQ ID NO: 103953
  peptide (1)..(272): Ceres Seq. ID no. 13613956

SEQ ID NO: 115193 - protein, 227 aa, Arabidopsis thaliana; identical to SEQ ID NO: 103954
  peptide (1)..(227): Ceres Seq. ID no. 13613957

SEQ ID NO: 115194 - DNA, 1497 bp, Arabidopsis thaliana; identical to SEQ ID NO: 103955
  misc_feature (1)..(1497): Ceres Seq. ID no. 13613958
  misc_feature (1)..(1497): Ortholog of  Ceres SEQ ID NO 13656435 as cited in SEQ ID NO 65853

SEQ ID NO: 115195 - protein, 429 aa, Arabidopsis thaliana; identical to SEQ ID NO: 43032
  peptide (1)..(429): Ceres Seq. ID no. 13613959

SEQ ID NO: 115196 - protein, 395 aa, Arabidopsis thaliana; identical to SEQ ID NO: 43033
  peptide (1)..(395): Ceres Seq. ID no. 13613960

SEQ ID NO: 115197 - protein, 263 aa, Arabidopsis thaliana; identical to SEQ ID NO: 43034
  peptide (1)..(263): Ceres Seq. ID no. 13613961

SEQ ID NO: 115198 - DNA, 1303 bp, Arabidopsis thaliana; identical to SEQ ID NO: 103959
  misc_feature (1)..(1303): Ceres Seq. ID no. 13613962
  misc_feature (1)..(1303): Ortholog of  Ceres SEQ ID NO 13661504 as cited in SEQ ID NO 61294
  misc_feature (1)..(1303): Ortholog of  Ceres SEQ ID NO 12615311 as cited in SEQ ID NO 62517
  misc_feature (1)..(1303): Ortholog of  Ceres SEQ ID NO 12617197 as cited in SEQ ID NO 63406
  misc_feature (1)..(1303): Ortholog of  Ceres SEQ ID NO 13598565 as cited in SEQ ID NO 65250
  misc_feature (1)..(1303): Ortholog of  Ceres SEQ ID NO 13598597 as cited in SEQ ID NO 65496
  misc_feature (1)..(1303): Ortholog of  Ceres SEQ ID NO 13596227 as cited in SEQ ID NO 68750
  misc_feature (1)..(1303): Ortholog of  Ceres SEQ ID NO 15179068 as cited in SEQ ID NO 0

SEQ ID NO: 115199 - protein, 303 aa, Arabidopsis thaliana; identical to SEQ ID NO: 42688
  peptide (1)..(303): Ceres Seq. ID no. 13613963

SEQ ID NO: 115200 - protein, 255 aa, Arabidopsis thaliana; identical to SEQ ID NO: 42689
  peptide (1)..(255): Ceres Seq. ID no. 13613964

SEQ ID NO: 115201 - protein, 251 aa, Arabidopsis thaliana; identical to SEQ ID NO: 42690
  peptide (1)..(251): Ceres Seq. ID no. 13613965

SEQ ID NO: 115202 - DNA, 1103 bp, Arabidopsis thaliana; identical to SEQ ID NO: 103963
  misc_feature (1)..(1103): Ceres Seq. ID no. 13613966
  misc_feature (1)..(1103): Ortholog of  Ceres SEQ ID NO 14313959 as cited in SEQ ID NO 57842

SEQ ID NO: 115203 - protein, 249 aa, Arabidopsis thaliana; identical to SEQ ID NO: 103964
  peptide (1)..(249): Ceres Seq. ID no. 13613967

SEQ ID NO: 115204 - protein, 155 aa, Arabidopsis thaliana; identical to SEQ ID NO: 103965
  peptide (1)..(155): Ceres Seq. ID no. 13613968

SEQ ID NO: 115205 - protein, 124 aa, Arabidopsis thaliana; identical to SEQ ID NO: 103966
  peptide (1)..(124): Ceres Seq. ID no. 13613969

SEQ ID NO: 115206 - DNA, 2371 bp, Arabidopsis thaliana; identical to SEQ ID NO: 103967
  misc_feature (1)..(2371): Ceres Seq. ID no. 13613970
  misc_feature (1)..(2371): Ortholog of  Ceres SEQ ID NO 14313674 as cited in SEQ ID NO 59602

SEQ ID NO: 115207 - protein, 733 aa, Arabidopsis thaliana; identical to SEQ ID NO: 103968
  peptide (1)..(733): Ceres Seq. ID no. 13613971

SEQ ID NO: 115208 - protein, 707 aa, Arabidopsis thaliana; identical to SEQ ID NO: 103969
  peptide (1)..(707): Ceres Seq. ID no. 13613972

SEQ ID NO: 115209 - protein, 564 aa, Arabidopsis thaliana; identical to SEQ ID NO: 103970
  peptide (1)..(564): Ceres Seq. ID no. 13613973

SEQ ID NO: 115210 - DNA, 1323 bp, Arabidopsis thaliana; identical to SEQ ID NO: 103971
  misc_feature (1)..(1323): Ceres Seq. ID no. 13613999
  misc_feature (1)..(1323): Ortholog of  Ceres SEQ ID NO 14310904 as cited in SEQ ID NO 53831
  misc_feature (1)..(1323): Ortholog of  Ceres SEQ ID NO 12616772 as cited in SEQ ID NO 64057

SEQ ID NO: 115211 - protein, 361 aa, Arabidopsis thaliana; identical to SEQ ID NO: 103972
  peptide (1)..(361): Ceres Seq. ID no. 13614000

SEQ ID NO: 115212 - protein, 359 aa, Arabidopsis thaliana; identical to SEQ ID NO: 103973
  peptide (1)..(359): Ceres Seq. ID no. 13614001

SEQ ID NO: 115213 - protein, 358 aa, Arabidopsis thaliana; identical to SEQ ID NO: 103974
  peptide (1)..(358): Ceres Seq. ID no. 13614002

SEQ ID NO: 115214 - DNA, 1922 bp, Arabidopsis thaliana; identical to SEQ ID NO: 103975
  misc_feature (1)..(1922): Ceres Seq. ID no. 13614011
  misc_feature (1)..(1922): Ortholog of  Ceres SEQ ID NO 14315134 as cited in SEQ ID NO 59476
  misc_feature (1)..(1922): Ortholog of  Ceres SEQ ID NO 12616332 as cited in SEQ ID NO 63449
  misc_feature (1)..(1922): Ortholog of  Ceres SEQ ID NO 13597498 as cited in SEQ ID NO 64648
  misc_feature (1)..(1922): Ortholog of  Ceres SEQ ID NO 14308053 as cited in SEQ ID NO 67790

SEQ ID NO: 115215 - protein, 407 aa, Arabidopsis thaliana; identical to SEQ ID NO: 42577
  peptide (1)..(407): Ceres Seq. ID no. 13614012

SEQ ID NO: 115216 - protein, 366 aa, Arabidopsis thaliana; identical to SEQ ID NO: 42578
  peptide (1)..(366): Ceres Seq. ID no. 13614013

SEQ ID NO: 115217 - protein, 289 aa, Arabidopsis thaliana; identical to SEQ ID NO: 42579
  peptide (1)..(289): Ceres Seq. ID no. 13614014

SEQ ID NO: 115218 - DNA, 2713 bp, Arabidopsis thaliana; identical to SEQ ID NO: 103979
  misc_feature (1)..(2713): Ceres Seq. ID no. 13614027
  misc_feature (1)..(2713): Ortholog of  Ceres SEQ ID NO 13593987 as cited in SEQ ID NO 54961

SEQ ID NO: 115219 - protein, 808 aa, Arabidopsis thaliana; identical to SEQ ID NO: 103980
  peptide (1)..(808): Ceres Seq. ID no. 13614028

SEQ ID NO: 115220 - protein, 787 aa, Arabidopsis thaliana; identical to SEQ ID NO: 103981
  peptide (1)..(787): Ceres Seq. ID no. 13614029

SEQ ID NO: 115221 - protein, 747 aa, Arabidopsis thaliana; identical to SEQ ID NO: 103982
  peptide (1)..(747): Ceres Seq. ID no. 13614030

SEQ ID NO: 115222 - DNA, 1741 bp, Arabidopsis thaliana; identical to SEQ ID NO: 103983
  misc_feature (1)..(1741): Ceres Seq. ID no. 13614031
  misc_feature (1)..(1741): Ortholog of  Ceres SEQ ID NO 13597407 as cited in SEQ ID NO 64106

SEQ ID NO: 115223 - protein, 463 aa, Arabidopsis thaliana; identical to SEQ ID NO: 40571
  peptide (1)..(463): Ceres Seq. ID no. 13614032

SEQ ID NO: 115224 - protein, 447 aa, Arabidopsis thaliana; identical to SEQ ID NO: 40572
  peptide (1)..(447): Ceres Seq. ID no. 13614033

SEQ ID NO: 115225 - protein, 437 aa, Arabidopsis thaliana; identical to SEQ ID NO: 40573
  peptide (1)..(437): Ceres Seq. ID no. 13614034

SEQ ID NO: 115226 - DNA, 944 bp, Arabidopsis thaliana; identical to SEQ ID NO: 103987
  misc_feature (1)..(944): Ceres Seq. ID no. 13614053
  misc_feature (1)..(944): Ortholog of  Ceres SEQ ID NO 14304536 as cited in SEQ ID NO 53436
  misc_feature (1)..(944): Ortholog of  Ceres SEQ ID NO 14315438 as cited in SEQ ID NO 57205

SEQ ID NO: 115227 - protein, 117 aa, Arabidopsis thaliana; identical to SEQ ID NO: 21367
  peptide (1)..(117): Ceres Seq. ID no. 13614054

SEQ ID NO: 115228 - DNA, 1483 bp, Arabidopsis thaliana; identical to SEQ ID NO: 103989
  misc_feature (1)..(1483): Ceres Seq. ID no. 13614061
  misc_feature (1)..(1483): Ortholog of  Ceres SEQ ID NO 13655434 as cited in SEQ ID NO 64337

SEQ ID NO: 115229 - protein, 441 aa, Arabidopsis thaliana; identical to SEQ ID NO: 103990
  peptide (1)..(441): Ceres Seq. ID no. 13614062

SEQ ID NO: 115230 - protein, 399 aa, Arabidopsis thaliana; identical to SEQ ID NO: 27594
  peptide (1)..(399): Ceres Seq. ID no. 13614063

SEQ ID NO: 115231 - protein, 330 aa, Arabidopsis thaliana; identical to SEQ ID NO: 27595
  peptide (1)..(330): Ceres Seq. ID no. 13614064

SEQ ID NO: 115232 - DNA, 1185 bp, Arabidopsis thaliana; identical to SEQ ID NO: 103993
  misc_feature (1)..(1185): Ceres Seq. ID no. 13614076
  misc_feature (1)..(1185): Ortholog of  Ceres SEQ ID NO 12609869 as cited in SEQ ID NO 52065
  misc_feature (1)..(1185): Ortholog of  Ceres SEQ ID NO 14301506 as cited in SEQ ID NO 61159
  misc_feature (1)..(1185): Ortholog of  Ceres SEQ ID NO 13597124 as cited in SEQ ID NO 64173
  misc_feature (1)..(1185): Ortholog of  Ceres SEQ ID NO 12780602 as cited in SEQ ID NO 65695

SEQ ID NO: 115233 - protein, 276 aa, Arabidopsis thaliana; identical to SEQ ID NO: 25200
  peptide (1)..(276): Ceres Seq. ID no. 13614077

SEQ ID NO: 115234 - protein, 156 aa, Arabidopsis thaliana; identical to SEQ ID NO: 25201
  peptide (1)..(156): Ceres Seq. ID no. 13614078

SEQ ID NO: 115235 - DNA, 1119 bp, Arabidopsis thaliana; identical to SEQ ID NO: 103996
  misc_feature (1)..(1119): Ceres Seq. ID no. 13614079
  misc_feature (1)..(1119): Ortholog of  Ceres SEQ ID NO 14311044 as cited in SEQ ID NO 53643

SEQ ID NO: 115236 - protein, 285 aa, Arabidopsis thaliana; identical to SEQ ID NO: 39563
  peptide (1)..(285): Ceres Seq. ID no. 13614080

SEQ ID NO: 115237 - protein, 150 aa, Arabidopsis thaliana; identical to SEQ ID NO: 39564
  peptide (1)..(150): Ceres Seq. ID no. 13614081

SEQ ID NO: 115238 - DNA, 1127 bp, Arabidopsis thaliana; identical to SEQ ID NO: 103999
  misc_feature (1)..(1127): Ceres Seq. ID no. 13614094
  misc_feature (1)..(1127): Ortholog of  Ceres SEQ ID NO 14307589 as cited in SEQ ID NO 20466
  misc_feature (1)..(1127): Ortholog of  Ceres SEQ ID NO 15225111 as cited in SEQ ID NO 58444
  misc_feature (1)..(1127): Ortholog of  Ceres SEQ ID NO 13661001 as cited in SEQ ID NO 67531
  misc_feature (1)..(1127): Ortholog of  Ceres SEQ ID NO 15178920 as cited in SEQ ID NO 0

SEQ ID NO: 115239 - protein, 206 aa, Arabidopsis thaliana; identical to SEQ ID NO: 38135
  peptide (1)..(206): Ceres Seq. ID no. 13614095

SEQ ID NO: 115240 - protein, 202 aa, Arabidopsis thaliana; identical to SEQ ID NO: 38136
  peptide (1)..(202): Ceres Seq. ID no. 13614096

SEQ ID NO: 115241 - protein, 175 aa, Arabidopsis thaliana; identical to SEQ ID NO: 38137
  peptide (1)..(175): Ceres Seq. ID no. 13614097

SEQ ID NO: 115242 - DNA, 1422 bp, Arabidopsis thaliana; identical to SEQ ID NO: 104003
  misc_feature (1)..(1422): Ceres Seq. ID no. 13614098
  misc_feature (1)..(1422): Ortholog of  Ceres SEQ ID NO 14311755 as cited in SEQ ID NO 57271
  misc_feature (1)..(1422): Ortholog of  Ceres SEQ ID NO 15171156 as cited in SEQ ID NO 58259
  misc_feature (1)..(1422): Ortholog of  Ceres SEQ ID NO 14302212 as cited in SEQ ID NO 66507
  misc_feature (1)..(1422): Ortholog of  Ceres SEQ ID NO 13653980 as cited in SEQ ID NO 69253

SEQ ID NO: 115243 - protein, 383 aa, Arabidopsis thaliana; identical to SEQ ID NO: 41149
  peptide (1)..(383): Ceres Seq. ID no. 13614099

SEQ ID NO: 115244 - protein, 302 aa, Arabidopsis thaliana; identical to SEQ ID NO: 41150
  peptide (1)..(302): Ceres Seq. ID no. 13614100

SEQ ID NO: 115245 - protein, 263 aa, Arabidopsis thaliana; identical to SEQ ID NO: 41151
  peptide (1)..(263): Ceres Seq. ID no. 13614101

SEQ ID NO: 115246 - DNA, 1249 bp, Arabidopsis thaliana; identical to SEQ ID NO: 104007
  misc_feature (1)..(1249): Ceres Seq. ID no. 13614110
  misc_feature (1)..(1249): Ortholog of  Ceres SEQ ID NO 15176317 as cited in SEQ ID NO 52865
  misc_feature (1)..(1249): Ortholog of  Ceres SEQ ID NO 13518893 as cited in SEQ ID NO 58108
  misc_feature (1)..(1249): Ortholog of  Ceres SEQ ID NO 12617152 as cited in SEQ ID NO 63555

SEQ ID NO: 115247 - protein, 341 aa, Arabidopsis thaliana; identical to SEQ ID NO: 26038
  peptide (1)..(341): Ceres Seq. ID no. 13614111

SEQ ID NO: 115248 - protein, 323 aa, Arabidopsis thaliana; identical to SEQ ID NO: 26039
  peptide (1)..(323): Ceres Seq. ID no. 13614112

SEQ ID NO: 115249 - protein, 188 aa, Arabidopsis thaliana; identical to SEQ ID NO: 26040
  peptide (1)..(188): Ceres Seq. ID no. 13614113

SEQ ID NO: 115250 - DNA, 1510 bp, Arabidopsis thaliana; identical to SEQ ID NO: 104011
  misc_feature (1)..(1510): Ceres Seq. ID no. 13614118
  misc_feature (1)..(1510): Ortholog of  Ceres SEQ ID NO 15226515 as cited in SEQ ID NO 58519

SEQ ID NO: 115251 - protein, 358 aa, Arabidopsis thaliana; identical to SEQ ID NO: 104012
  peptide (1)..(358): Ceres Seq. ID no. 13614119

SEQ ID NO: 115252 - protein, 299 aa, Arabidopsis thaliana; identical to SEQ ID NO: 104013
  peptide (1)..(299): Ceres Seq. ID no. 13614120

SEQ ID NO: 115253 - protein, 290 aa, Arabidopsis thaliana; identical to SEQ ID NO: 104014
  peptide (1)..(290): Ceres Seq. ID no. 13614121

SEQ ID NO: 115254 - DNA, 1934 bp, Arabidopsis thaliana; identical to SEQ ID NO: 104015
  misc_feature (1)..(1934): Ceres Seq. ID no. 13614122
  misc_feature (1)..(1934): Ortholog of  Ceres SEQ ID NO 14310841 as cited in SEQ ID NO 53666
  misc_feature (1)..(1934): Ortholog of  Ceres SEQ ID NO 15178736 as cited in SEQ ID NO 56439
  misc_feature (1)..(1934): Ortholog of  Ceres SEQ ID NO 14308493 as cited in SEQ ID NO 60320

SEQ ID NO: 115255 - protein, 536 aa, Arabidopsis thaliana; identical to SEQ ID NO: 27963
  peptide (1)..(536): Ceres Seq. ID no. 13614123

SEQ ID NO: 115256 - protein, 529 aa, Arabidopsis thaliana; identical to SEQ ID NO: 27964
  peptide (1)..(529): Ceres Seq. ID no. 13614124

SEQ ID NO: 115257 - protein, 484 aa, Arabidopsis thaliana; identical to SEQ ID NO: 27965
  peptide (1)..(484): Ceres Seq. ID no. 13614125

SEQ ID NO: 115258 - DNA, 1208 bp, Arabidopsis thaliana; identical to SEQ ID NO: 104019
  misc_feature (1)..(1208): Ceres Seq. ID no. 13614130
  misc_feature (1)..(1208): Ortholog of  Ceres SEQ ID NO 13596440 as cited in SEQ ID NO 68769

SEQ ID NO: 115259 - protein, 308 aa, Arabidopsis thaliana; identical to SEQ ID NO: 104020
  peptide (1)..(308): Ceres Seq. ID no. 13614131

SEQ ID NO: 115260 - protein, 304 aa, Arabidopsis thaliana; identical to SEQ ID NO: 104021
  peptide (1)..(304): Ceres Seq. ID no. 13614132

SEQ ID NO: 115261 - protein, 256 aa, Arabidopsis thaliana; identical to SEQ ID NO: 104022
  peptide (1)..(256): Ceres Seq. ID no. 13614133

SEQ ID NO: 115262 - DNA, 850 bp, Arabidopsis thaliana; identical to SEQ ID NO: 104023
  misc_feature (1)..(850): Ceres Seq. ID no. 13614134
  misc_feature (1)..(850): Ortholog of  Ceres SEQ ID NO 13597809 as cited in SEQ ID NO 64598
  misc_feature (1)..(850): Ortholog of  Ceres SEQ ID NO 12617960 as cited in SEQ ID NO 69051
  misc_feature (1)..(850): Ortholog of  Ceres SEQ ID NO 13589401 as cited in SEQ ID NO 0

SEQ ID NO: 115263 - protein, 254 aa, Arabidopsis thaliana; identical to SEQ ID NO: 104024
  peptide (1)..(254): Ceres Seq. ID no. 13614135

SEQ ID NO: 115264 - protein, 225 aa, Arabidopsis thaliana; identical to SEQ ID NO: 104025
  peptide (1)..(225): Ceres Seq. ID no. 13614136

SEQ ID NO: 115265 - protein, 161 aa, Arabidopsis thaliana; identical to SEQ ID NO: 104026
  peptide (1)..(161): Ceres Seq. ID no. 13614137

SEQ ID NO: 115266 - DNA, 1991 bp, Arabidopsis thaliana; identical to SEQ ID NO: 104027
  misc_feature (1)..(1991): Ceres Seq. ID no. 13614150
  misc_feature (1)..(1991): Ortholog of  Ceres SEQ ID NO 14302828 as cited in SEQ ID NO 65549

SEQ ID NO: 115267 - protein, 552 aa, Arabidopsis thaliana; identical to SEQ ID NO: 104028
  peptide (1)..(552): Ceres Seq. ID no. 13614151

SEQ ID NO: 115268 - protein, 499 aa, Arabidopsis thaliana; identical to SEQ ID NO: 104029
  peptide (1)..(499): Ceres Seq. ID no. 13614152

SEQ ID NO: 115269 - protein, 468 aa, Arabidopsis thaliana; identical to SEQ ID NO: 104030
  peptide (1)..(468): Ceres Seq. ID no. 13614153

SEQ ID NO: 115270 - DNA, 1959 bp, Arabidopsis thaliana; identical to SEQ ID NO: 104031
  misc_feature (1)..(1959): Ceres Seq. ID no. 13614154
  misc_feature (1)..(1959): Ortholog of  Ceres SEQ ID NO 14314144 as cited in SEQ ID NO 54403
  misc_feature (1)..(1959): Ortholog of  Ceres SEQ ID NO 15169663 as cited in SEQ ID NO 64659
  misc_feature (1)..(1959): Ortholog of  Ceres SEQ ID NO 13656177 as cited in SEQ ID NO 64997
  misc_feature (1)..(1959): Ortholog of  Ceres SEQ ID NO 15225015 as cited in SEQ ID NO 0

SEQ ID NO: 115271 - protein, 568 aa, Arabidopsis thaliana; identical to SEQ ID NO: 48241
  peptide (1)..(568): Ceres Seq. ID no. 13614155

SEQ ID NO: 115272 - protein, 500 aa, Arabidopsis thaliana; identical to SEQ ID NO: 48242
  peptide (1)..(500): Ceres Seq. ID no. 13614156

SEQ ID NO: 115273 - protein, 483 aa, Arabidopsis thaliana; identical to SEQ ID NO: 48243
  peptide (1)..(483): Ceres Seq. ID no. 13614157

SEQ ID NO: 115274 - DNA, 1027 bp, Arabidopsis thaliana; identical to SEQ ID NO: 104035
  misc_feature (1)..(1027): Ceres Seq. ID no. 13614181
  misc_feature (1)..(1027): Ortholog of  Ceres SEQ ID NO 13660094 as cited in SEQ ID NO 60820
  misc_feature (1)..(1027): Ortholog of  Ceres SEQ ID NO 13656436 as cited in SEQ ID NO 69154

SEQ ID NO: 115275 - protein, 206 aa, Arabidopsis thaliana; identical to SEQ ID NO: 38968
  peptide (1)..(206): Ceres Seq. ID no. 13614182

SEQ ID NO: 115276 - protein, 182 aa, Arabidopsis thaliana; identical to SEQ ID NO: 38969
  peptide (1)..(182): Ceres Seq. ID no. 13614183

SEQ ID NO: 115277 - protein, 114 aa, Arabidopsis thaliana; identical to SEQ ID NO: 38970
  peptide (1)..(114): Ceres Seq. ID no. 13614184

SEQ ID NO: 115278 - DNA, 1047 bp, Arabidopsis thaliana; identical to SEQ ID NO: 104039
  misc_feature (1)..(1047): Ceres Seq. ID no. 13614189
  misc_feature (1)..(1047): Ortholog of  Ceres SEQ ID NO 13595202 as cited in SEQ ID NO 56273

SEQ ID NO: 115279 - protein, 281 aa, Arabidopsis thaliana; identical to SEQ ID NO: 104040
  peptide (1)..(281): Ceres Seq. ID no. 13614190

SEQ ID NO: 115280 - protein, 185 aa, Arabidopsis thaliana; identical to SEQ ID NO: 104041
  peptide (1)..(185): Ceres Seq. ID no. 13614191

SEQ ID NO: 115281 - protein, 184 aa, Arabidopsis thaliana; identical to SEQ ID NO: 104042
  peptide (1)..(184): Ceres Seq. ID no. 13614192

SEQ ID NO: 115282 - DNA, 1536 bp, Arabidopsis thaliana; identical to SEQ ID NO: 104043
  misc_feature (1)..(1536): Ceres Seq. ID no. 13614201
  misc_feature (1)..(1536): Ortholog of  Ceres SEQ ID NO 15171442 as cited in SEQ ID NO 51520

SEQ ID NO: 115283 - protein, 341 aa, Arabidopsis thaliana; identical to SEQ ID NO: 36797
  peptide (1)..(341): Ceres Seq. ID no. 13614202

SEQ ID NO: 115284 - protein, 232 aa, Arabidopsis thaliana; identical to SEQ ID NO: 36798
  peptide (1)..(232): Ceres Seq. ID no. 13614203

SEQ ID NO: 115285 - DNA, 1255 bp, Arabidopsis thaliana; identical to SEQ ID NO: 104046
  misc_feature (1)..(1255): Ceres Seq. ID no. 13614204
  misc_feature (1)..(1255): Ortholog of  Ceres SEQ ID NO 12636774 as cited in SEQ ID NO 372
  misc_feature (1)..(1255): Ortholog of  Ceres SEQ ID NO 15174842 as cited in SEQ ID NO 53054
  misc_feature (1)..(1255): Ortholog of  Ceres SEQ ID NO 14310917 as cited in SEQ ID NO 53231
  misc_feature (1)..(1255): Ortholog of  Ceres SEQ ID NO 15170037 as cited in SEQ ID NO 55447
  misc_feature (1)..(1255): Ortholog of  Ceres SEQ ID NO 13582350 as cited in SEQ ID NO 56734
  misc_feature (1)..(1255): Ortholog of  Ceres SEQ ID NO 12476493 as cited in SEQ ID NO 58163
  misc_feature (1)..(1255): Ortholog of  Ceres SEQ ID NO 13597295 as cited in SEQ ID NO 63743
  misc_feature (1)..(1255): Ortholog of  Ceres SEQ ID NO 12617090 as cited in SEQ ID NO 64005
  misc_feature (1)..(1255): Ortholog of  Ceres SEQ ID NO 13597233 as cited in SEQ ID NO 64370
  misc_feature (1)..(1255): Ortholog of  Ceres SEQ ID NO 13599438 as cited in SEQ ID NO 0

SEQ ID NO: 115286 - protein, 352 aa, Arabidopsis thaliana; identical to SEQ ID NO: 23735
  peptide (1)..(352): Ceres Seq. ID no. 13614205

SEQ ID NO: 115287 - protein, 248 aa, Arabidopsis thaliana; identical to SEQ ID NO: 23736
  peptide (1)..(248): Ceres Seq. ID no. 13614206

SEQ ID NO: 115288 - DNA, 1173 bp, Arabidopsis thaliana; identical to SEQ ID NO: 104049
  misc_feature (1)..(1173): Ceres Seq. ID no. 13614207
  misc_feature (1)..(1173): Ortholog of  Ceres SEQ ID NO 15174842 as cited in SEQ ID NO 53054
  misc_feature (1)..(1173): Ortholog of  Ceres SEQ ID NO 14310917 as cited in SEQ ID NO 53231
  misc_feature (1)..(1173): Ortholog of  Ceres SEQ ID NO 15170037 as cited in SEQ ID NO 55447
  misc_feature (1)..(1173): Ortholog of  Ceres SEQ ID NO 12615466 as cited in SEQ ID NO 62761
  misc_feature (1)..(1173): Ortholog of  Ceres SEQ ID NO 13597295 as cited in SEQ ID NO 63743
  misc_feature (1)..(1173): Ortholog of  Ceres SEQ ID NO 12617090 as cited in SEQ ID NO 64005
  misc_feature (1)..(1173): Ortholog of  Ceres SEQ ID NO 13597439 as cited in SEQ ID NO 64081
  misc_feature (1)..(1173): Ortholog of  Ceres SEQ ID NO 13597233 as cited in SEQ ID NO 64370
  misc_feature (1)..(1173): Ortholog of  Ceres SEQ ID NO 13598327 as cited in SEQ ID NO 68040

SEQ ID NO: 115289 - protein, 374 aa, Arabidopsis thaliana; identical to SEQ ID NO: 37546
  peptide (1)..(374): Ceres Seq. ID no. 13614208

SEQ ID NO: 115290 - protein, 349 aa, Arabidopsis thaliana; identical to SEQ ID NO: 37547
  peptide (1)..(349): Ceres Seq. ID no. 13614209

SEQ ID NO: 115291 - protein, 270 aa, Arabidopsis thaliana; identical to SEQ ID NO: 37548
  peptide (1)..(270): Ceres Seq. ID no. 13614210

SEQ ID NO: 115292 - DNA, 1690 bp, Arabidopsis thaliana; identical to SEQ ID NO: 104053
  misc_feature (1)..(1690): Ceres Seq. ID no. 13614213
  misc_feature (1)..(1690): Ortholog of  Ceres SEQ ID NO 14303479 as cited in SEQ ID NO 54254
  misc_feature (1)..(1690): Ortholog of  Ceres SEQ ID NO 12611392 as cited in SEQ ID NO 56826
  misc_feature (1)..(1690): Ortholog of  Ceres SEQ ID NO 13660872 as cited in SEQ ID NO 60830
  misc_feature (1)..(1690): Ortholog of  Ceres SEQ ID NO 12616221 as cited in SEQ ID NO 63291

SEQ ID NO: 115293 - protein, 297 aa, Arabidopsis thaliana; identical to SEQ ID NO: 24428
  peptide (1)..(297): Ceres Seq. ID no. 13614214

SEQ ID NO: 115294 - protein, 164 aa, Arabidopsis thaliana; identical to SEQ ID NO: 24429
  peptide (1)..(164): Ceres Seq. ID no. 13614215

SEQ ID NO: 115295 - DNA, 1276 bp, Arabidopsis thaliana; identical to SEQ ID NO: 104056
  misc_feature (1)..(1276): Ceres Seq. ID no. 13614216
  misc_feature (1)..(1276): Ortholog of  Ceres SEQ ID NO 14315614 as cited in SEQ ID NO 52972
  misc_feature (1)..(1276): Ortholog of  Ceres SEQ ID NO 14302754 as cited in SEQ ID NO 61212

SEQ ID NO: 115296 - protein, 391 aa, Arabidopsis thaliana; identical to SEQ ID NO: 104057
  peptide (1)..(391): Ceres Seq. ID no. 13614217

SEQ ID NO: 115297 - protein, 324 aa, Arabidopsis thaliana; identical to SEQ ID NO: 104058
  peptide (1)..(324): Ceres Seq. ID no. 13614218

SEQ ID NO: 115298 - protein, 211 aa, Arabidopsis thaliana; identical to SEQ ID NO: 104059
  peptide (1)..(211): Ceres Seq. ID no. 13614219

SEQ ID NO: 115299 - DNA, 973 bp, Arabidopsis thaliana; identical to SEQ ID NO: 104060
  misc_feature (1)..(973): Ceres Seq. ID no. 13614224
  misc_feature (1)..(973): Ortholog of  Ceres SEQ ID NO 13594180 as cited in SEQ ID NO 60353

SEQ ID NO: 115300 - protein, 224 aa, Arabidopsis thaliana; identical to SEQ ID NO: 29403
  peptide (1)..(224): Ceres Seq. ID no. 13614225

SEQ ID NO: 115301 - protein, 188 aa, Arabidopsis thaliana; identical to SEQ ID NO: 29404
  peptide (1)..(188): Ceres Seq. ID no. 13614226

SEQ ID NO: 115302 - DNA, 1043 bp, Arabidopsis thaliana; identical to SEQ ID NO: 104063
  misc_feature (1)..(1043): Ceres Seq. ID no. 13614227
  misc_feature (1)..(1043): Ortholog of  Ceres SEQ ID NO 15226526 as cited in SEQ ID NO 54159

SEQ ID NO: 115303 - protein, 311 aa, Arabidopsis thaliana; identical to SEQ ID NO: 104064
  peptide (1)..(311): Ceres Seq. ID no. 13614228

SEQ ID NO: 115304 - protein, 305 aa, Arabidopsis thaliana; identical to SEQ ID NO: 104065
  peptide (1)..(305): Ceres Seq. ID no. 13614229

SEQ ID NO: 115305 - protein, 273 aa, Arabidopsis thaliana; identical to SEQ ID NO: 104066
  peptide (1)..(273): Ceres Seq. ID no. 13614230

SEQ ID NO: 115306 - DNA, 1598 bp, Arabidopsis thaliana; identical to SEQ ID NO: 104067
  misc_feature (1)..(1598): Ceres Seq. ID no. 13614235
  misc_feature (1)..(1598): Ortholog of  Ceres SEQ ID NO 14311032 as cited in SEQ ID NO 54590
  misc_feature (1)..(1598): Ortholog of  Ceres SEQ ID NO 15170493 as cited in SEQ ID NO 58432

SEQ ID NO: 115307 - protein, 413 aa, Arabidopsis thaliana; identical to SEQ ID NO: 42489
  peptide (1)..(413): Ceres Seq. ID no. 13614236

SEQ ID NO: 115308 - protein, 378 aa, Arabidopsis thaliana; identical to SEQ ID NO: 42490
  peptide (1)..(378): Ceres Seq. ID no. 13614237

SEQ ID NO: 115309 - protein, 318 aa, Arabidopsis thaliana; identical to SEQ ID NO: 42491
  peptide (1)..(318): Ceres Seq. ID no. 13614238

SEQ ID NO: 115310 - DNA, 907 bp, Arabidopsis thaliana; identical to SEQ ID NO: 104071
  misc_feature (1)..(907): Ceres Seq. ID no. 13614239
  misc_feature (1)..(907): Ortholog of  Ceres SEQ ID NO 12626108 as cited in SEQ ID NO 64252

SEQ ID NO: 115311 - protein, 278 aa, Arabidopsis thaliana; identical to SEQ ID NO: 28714
  peptide (1)..(278): Ceres Seq. ID no. 13614240

SEQ ID NO: 115312 - protein, 274 aa, Arabidopsis thaliana; identical to SEQ ID NO: 28715
  peptide (1)..(274): Ceres Seq. ID no. 13614241

SEQ ID NO: 115313 - DNA, 1211 bp, Arabidopsis thaliana; identical to SEQ ID NO: 104074
  misc_feature (1)..(1211): Ceres Seq. ID no. 13614242
  misc_feature (1)..(1211): Ortholog of  Ceres SEQ ID NO 14306671 as cited in SEQ ID NO 53809
  misc_feature (1)..(1211): Ortholog of  Ceres SEQ ID NO 15178206 as cited in SEQ ID NO 57238
  misc_feature (1)..(1211): Ortholog of  Ceres SEQ ID NO 13596735 as cited in SEQ ID NO 62904

SEQ ID NO: 115314 - protein, 304 aa, Arabidopsis thaliana; identical to SEQ ID NO: 104075
  peptide (1)..(304): Ceres Seq. ID no. 13614243

SEQ ID NO: 115315 - protein, 199 aa, Arabidopsis thaliana; identical to SEQ ID NO: 37675
  peptide (1)..(199): Ceres Seq. ID no. 13614244

SEQ ID NO: 115316 - DNA, 1215 bp, Arabidopsis thaliana; identical to SEQ ID NO: 104077
  misc_feature (1)..(1215): Ceres Seq. ID no. 13614245
  misc_feature (1)..(1215): Ortholog of  Ceres SEQ ID NO 15227026 as cited in SEQ ID NO 52193
  misc_feature (1)..(1215): Ortholog of  Ceres SEQ ID NO 15177903 as cited in SEQ ID NO 54993
  misc_feature (1)..(1215): Ortholog of  Ceres SEQ ID NO 13595454 as cited in SEQ ID NO 56502

SEQ ID NO: 115317 - protein, 315 aa, Arabidopsis thaliana; identical to SEQ ID NO: 104078
  peptide (1)..(315): Ceres Seq. ID no. 13614246

SEQ ID NO: 115318 - protein, 285 aa, Arabidopsis thaliana; identical to SEQ ID NO: 27729
  peptide (1)..(285): Ceres Seq. ID no. 13614247

SEQ ID NO: 115319 - protein, 284 aa, Arabidopsis thaliana; identical to SEQ ID NO: 27730
  peptide (1)..(284): Ceres Seq. ID no. 13614248

SEQ ID NO: 115320 - DNA, 1388 bp, Arabidopsis thaliana; identical to SEQ ID NO: 104081
  misc_feature (1)..(1388): Ceres Seq. ID no. 13614266
  misc_feature (1)..(1388): Ortholog of  Ceres SEQ ID NO 15176709 as cited in SEQ ID NO 1148
  misc_feature (1)..(1388): Ortholog of  Ceres SEQ ID NO 13658922 as cited in SEQ ID NO 66316

SEQ ID NO: 115321 - protein, 379 aa, Arabidopsis thaliana; identical to SEQ ID NO: 37651
  peptide (1)..(379): Ceres Seq. ID no. 13614267

SEQ ID NO: 115322 - protein, 295 aa, Arabidopsis thaliana; identical to SEQ ID NO: 37652
  peptide (1)..(295): Ceres Seq. ID no. 13614268

SEQ ID NO: 115323 - protein, 267 aa, Arabidopsis thaliana; identical to SEQ ID NO: 37653
  peptide (1)..(267): Ceres Seq. ID no. 13614269

SEQ ID NO: 115324 - DNA, 1284 bp, Arabidopsis thaliana; identical to SEQ ID NO: 104085
  misc_feature (1)..(1284): Ceres Seq. ID no. 13614270
  misc_feature (1)..(1284): Ortholog of  Ceres SEQ ID NO 13582619 as cited in SEQ ID NO 56520
  misc_feature (1)..(1284): Ortholog of  Ceres SEQ ID NO 13660872 as cited in SEQ ID NO 60830
  misc_feature (1)..(1284): Ortholog of  Ceres SEQ ID NO 12616221 as cited in SEQ ID NO 63291

SEQ ID NO: 115325 - protein, 352 aa, Arabidopsis thaliana; identical to SEQ ID NO: 23194
  peptide (1)..(352): Ceres Seq. ID no. 13614271

SEQ ID NO: 115326 - protein, 236 aa, Arabidopsis thaliana; identical to SEQ ID NO: 23195
  peptide (1)..(236): Ceres Seq. ID no. 13614272

SEQ ID NO: 115327 - protein, 226 aa, Arabidopsis thaliana; identical to SEQ ID NO: 23196
  peptide (1)..(226): Ceres Seq. ID no. 13614273

SEQ ID NO: 115328 - DNA, 2034 bp, Arabidopsis thaliana; identical to SEQ ID NO: 104089
  misc_feature (1)..(2034): Ceres Seq. ID no. 13614285
  misc_feature (1)..(2034): Ortholog of  Ceres SEQ ID NO 13591098 as cited in SEQ ID NO 64770

SEQ ID NO: 115329 - protein, 613 aa, Arabidopsis thaliana; identical to SEQ ID NO: 104090
  peptide (1)..(613): Ceres Seq. ID no. 13614286

SEQ ID NO: 115330 - protein, 507 aa, Arabidopsis thaliana; identical to SEQ ID NO: 104091
  peptide (1)..(507): Ceres Seq. ID no. 13614287

SEQ ID NO: 115331 - protein, 496 aa, Arabidopsis thaliana; identical to SEQ ID NO: 104092
  peptide (1)..(496): Ceres Seq. ID no. 13614288

SEQ ID NO: 115332 - DNA, 1053 bp, Arabidopsis thaliana; identical to SEQ ID NO: 104093
  misc_feature (1)..(1053): Ceres Seq. ID no. 13614292
  misc_feature (1)..(1053): Ortholog of  Ceres SEQ ID NO 14313060 as cited in SEQ ID NO 59447
  misc_feature (1)..(1053): Ortholog of  Ceres SEQ ID NO 12624676 as cited in SEQ ID NO 61197

SEQ ID NO: 115333 - protein, 241 aa, Arabidopsis thaliana; identical to SEQ ID NO: 26294
  peptide (1)..(241): Ceres Seq. ID no. 13614293

SEQ ID NO: 115334 - protein, 225 aa, Arabidopsis thaliana; identical to SEQ ID NO: 26295
  peptide (1)..(225): Ceres Seq. ID no. 13614294

SEQ ID NO: 115335 - protein, 216 aa, Arabidopsis thaliana; identical to SEQ ID NO: 26296
  peptide (1)..(216): Ceres Seq. ID no. 13614295

SEQ ID NO: 115336 - DNA, 1610 bp, Arabidopsis thaliana; identical to SEQ ID NO: 104097
  misc_feature (1)..(1610): Ceres Seq. ID no. 13614307
  misc_feature (1)..(1610): Ortholog of  Ceres SEQ ID NO 13594349 as cited in SEQ ID NO 58161
  misc_feature (1)..(1610): Ortholog of  Ceres SEQ ID NO 13663419 as cited in SEQ ID NO 66561
  misc_feature (1)..(1610): Ortholog of  Ceres SEQ ID NO 15177892 as cited in SEQ ID NO 0

SEQ ID NO: 115337 - protein, 491 aa, Arabidopsis thaliana; identical to SEQ ID NO: 104098
  peptide (1)..(491): Ceres Seq. ID no. 13614308

SEQ ID NO: 115338 - protein, 473 aa, Arabidopsis thaliana; identical to SEQ ID NO: 37661
  peptide (1)..(473): Ceres Seq. ID no. 13614309

SEQ ID NO: 115339 - protein, 471 aa, Arabidopsis thaliana; identical to SEQ ID NO: 104100
  peptide (1)..(471): Ceres Seq. ID no. 13614310

SEQ ID NO: 115340 - DNA, 1360 bp, Arabidopsis thaliana; identical to SEQ ID NO: 104101
  misc_feature (1)..(1360): Ceres Seq. ID no. 13614311
  misc_feature (1)..(1360): Ortholog of  Ceres SEQ ID NO 14301830 as cited in SEQ ID NO 62310
  misc_feature (1)..(1360): Ortholog of  Ceres SEQ ID NO 15179524 as cited in SEQ ID NO 0

SEQ ID NO: 115341 - protein, 357 aa, Arabidopsis thaliana; identical to SEQ ID NO: 22476
  peptide (1)..(357): Ceres Seq. ID no. 13614312

SEQ ID NO: 115342 - protein, 321 aa, Arabidopsis thaliana; identical to SEQ ID NO: 22477
  peptide (1)..(321): Ceres Seq. ID no. 13614313

SEQ ID NO: 115343 - protein, 259 aa, Arabidopsis thaliana; identical to SEQ ID NO: 22478
  peptide (1)..(259): Ceres Seq. ID no. 13614314

SEQ ID NO: 115344 - DNA, 2224 bp, Arabidopsis thaliana; identical to SEQ ID NO: 104105
  misc_feature (1)..(2224): Ceres Seq. ID no. 13614320
  misc_feature (1)..(2224): Ortholog of  Ceres SEQ ID NO 13657008 as cited in SEQ ID NO 69164

SEQ ID NO: 115345 - protein, 561 aa, Arabidopsis thaliana; identical to SEQ ID NO: 39881
  peptide (1)..(561): Ceres Seq. ID no. 13614321

SEQ ID NO: 115346 - protein, 500 aa, Arabidopsis thaliana; identical to SEQ ID NO: 39882
  peptide (1)..(500): Ceres Seq. ID no. 13614322

SEQ ID NO: 115347 - protein, 495 aa, Arabidopsis thaliana; identical to SEQ ID NO: 39883
  peptide (1)..(495): Ceres Seq. ID no. 13614323

SEQ ID NO: 115348 - DNA, 1308 bp, Arabidopsis thaliana; identical to SEQ ID NO: 104109
  misc_feature (1)..(1308): Ceres Seq. ID no. 13614328
  misc_feature (1)..(1308): Ortholog of  Ceres SEQ ID NO 13598488 as cited in SEQ ID NO 63862
  misc_feature (1)..(1308): Ortholog of  Ceres SEQ ID NO 13659640 as cited in SEQ ID NO 67101

SEQ ID NO: 115349 - protein, 370 aa, Arabidopsis thaliana; identical to SEQ ID NO: 25872
  peptide (1)..(370): Ceres Seq. ID no. 13614329

SEQ ID NO: 115350 - protein, 347 aa, Arabidopsis thaliana; identical to SEQ ID NO: 25873
  peptide (1)..(347): Ceres Seq. ID no. 13614330

SEQ ID NO: 115351 - protein, 236 aa, Arabidopsis thaliana; identical to SEQ ID NO: 25874
  peptide (1)..(236): Ceres Seq. ID no. 13614331

SEQ ID NO: 115352 - DNA, 1593 bp, Arabidopsis thaliana; identical to SEQ ID NO: 104113
  misc_feature (1)..(1593): Ceres Seq. ID no. 13614332
  misc_feature (1)..(1593): Ortholog of  Ceres SEQ ID NO 14315993 as cited in SEQ ID NO 57788

SEQ ID NO: 115353 - protein, 353 aa, Arabidopsis thaliana; identical to SEQ ID NO: 24763
  peptide (1)..(353): Ceres Seq. ID no. 13614333

SEQ ID NO: 115354 - protein, 292 aa, Arabidopsis thaliana; identical to SEQ ID NO: 24764
  peptide (1)..(292): Ceres Seq. ID no. 13614334

SEQ ID NO: 115355 - protein, 244 aa, Arabidopsis thaliana; identical to SEQ ID NO: 24765
  peptide (1)..(244): Ceres Seq. ID no. 13614335

SEQ ID NO: 115356 - DNA, 1157 bp, Arabidopsis thaliana; identical to SEQ ID NO: 104117
  misc_feature (1)..(1157): Ceres Seq. ID no. 13614336
  misc_feature (1)..(1157): Ortholog of  Ceres SEQ ID NO 14311969 as cited in SEQ ID NO 58929
  misc_feature (1)..(1157): Ortholog of  Ceres SEQ ID NO 14309357 as cited in SEQ ID NO 0

SEQ ID NO: 115357 - protein, 265 aa, Arabidopsis thaliana; identical to SEQ ID NO: 24254
  peptide (1)..(265): Ceres Seq. ID no. 13614337

SEQ ID NO: 115358 - protein, 242 aa, Arabidopsis thaliana; identical to SEQ ID NO: 24255
  peptide (1)..(242): Ceres Seq. ID no. 13614338

SEQ ID NO: 115359 - protein, 238 aa, Arabidopsis thaliana; identical to SEQ ID NO: 24256
  peptide (1)..(238): Ceres Seq. ID no. 13614339

SEQ ID NO: 115360 - DNA, 843 bp, Arabidopsis thaliana; identical to SEQ ID NO: 104121
  misc_feature (1)..(843): Ceres Seq. ID no. 13614340
  misc_feature (1)..(843): Ortholog of  Ceres SEQ ID NO 12557850 as cited in SEQ ID NO 65
  misc_feature (1)..(843): Ortholog of  Ceres SEQ ID NO 14312702 as cited in SEQ ID NO 0

SEQ ID NO: 115361 - protein, 191 aa, Arabidopsis thaliana; identical to SEQ ID NO: 21551
  peptide (1)..(191): Ceres Seq. ID no. 13614341

SEQ ID NO: 115362 - protein, 140 aa, Arabidopsis thaliana; identical to SEQ ID NO: 21552
  peptide (1)..(140): Ceres Seq. ID no. 13614342

SEQ ID NO: 115363 - DNA, 1169 bp, Arabidopsis thaliana; identical to SEQ ID NO: 104124
  misc_feature (1)..(1169): Ceres Seq. ID no. 13614343
  misc_feature (1)..(1169): Ortholog of  Ceres SEQ ID NO 13595668 as cited in SEQ ID NO 56792

SEQ ID NO: 115364 - protein, 281 aa, Arabidopsis thaliana; identical to SEQ ID NO: 104125
  peptide (1)..(281): Ceres Seq. ID no. 13614344

SEQ ID NO: 115365 - protein, 273 aa, Arabidopsis thaliana; identical to SEQ ID NO: 104126
  peptide (1)..(273): Ceres Seq. ID no. 13614345

SEQ ID NO: 115366 - protein, 198 aa, Arabidopsis thaliana; identical to SEQ ID NO: 104127
  peptide (1)..(198): Ceres Seq. ID no. 13614346

SEQ ID NO: 115367 - DNA, 1027 bp, Arabidopsis thaliana; identical to SEQ ID NO: 104128
  misc_feature (1)..(1027): Ceres Seq. ID no. 13614351
  misc_feature (1)..(1027): Ortholog of  Ceres SEQ ID NO 14305022 as cited in SEQ ID NO 53586
  misc_feature (1)..(1027): Ortholog of  Ceres SEQ ID NO 12506279 as cited in SEQ ID NO 55440
  misc_feature (1)..(1027): Ortholog of  Ceres SEQ ID NO 13654847 as cited in SEQ ID NO 62459
  misc_feature (1)..(1027): Ortholog of  Ceres SEQ ID NO 15174357 as cited in SEQ ID NO 0

SEQ ID NO: 115368 - protein, 252 aa, Arabidopsis thaliana; identical to SEQ ID NO: 27570
  peptide (1)..(252): Ceres Seq. ID no. 13614352

SEQ ID NO: 115369 - DNA, 1117 bp, Arabidopsis thaliana; identical to SEQ ID NO: 104130
  misc_feature (1)..(1117): Ceres Seq. ID no. 13614366
  misc_feature (1)..(1117): Ortholog of  Ceres SEQ ID NO 12564952 as cited in SEQ ID NO 63211

SEQ ID NO: 115370 - protein, 271 aa, Arabidopsis thaliana; identical to SEQ ID NO: 43209
  peptide (1)..(271): Ceres Seq. ID no. 13614367

SEQ ID NO: 115371 - protein, 144 aa, Arabidopsis thaliana; identical to SEQ ID NO: 43210
  peptide (1)..(144): Ceres Seq. ID no. 13614368

SEQ ID NO: 115372 - DNA, 654 bp, Arabidopsis thaliana; identical to SEQ ID NO: 104133
  misc_feature (1)..(654): Ceres Seq. ID no. 13614372
  misc_feature (1)..(654): Ortholog of  Ceres SEQ ID NO 15178899 as cited in SEQ ID NO 0

SEQ ID NO: 115373 - protein, 179 aa, Arabidopsis thaliana; identical to SEQ ID NO: 104134
  peptide (1)..(179): Ceres Seq. ID no. 13614373

SEQ ID NO: 115374 - DNA, 1131 bp, Arabidopsis thaliana; identical to SEQ ID NO: 104135
  misc_feature (1)..(1131): Ceres Seq. ID no. 13614378
  misc_feature (1)..(1131): Ortholog of  Ceres SEQ ID NO 15172778 as cited in SEQ ID NO 59302

SEQ ID NO: 115375 - protein, 284 aa, Arabidopsis thaliana; identical to SEQ ID NO: 23892
  peptide (1)..(284): Ceres Seq. ID no. 13614379

SEQ ID NO: 115376 - protein, 272 aa, Arabidopsis thaliana; identical to SEQ ID NO: 23893
  peptide (1)..(272): Ceres Seq. ID no. 13614380

SEQ ID NO: 115377 - protein, 253 aa, Arabidopsis thaliana; identical to SEQ ID NO: 104138
  peptide (1)..(253): Ceres Seq. ID no. 13614381

SEQ ID NO: 115378 - DNA, 1245 bp, Arabidopsis thaliana; identical to SEQ ID NO: 104139
  misc_feature (1)..(1245): Ceres Seq. ID no. 13614392
  misc_feature (1)..(1245): Ortholog of  Ceres SEQ ID NO 15225507 as cited in SEQ ID NO 55551
  misc_feature (1)..(1245): Ortholog of  Ceres SEQ ID NO 15225677 as cited in SEQ ID NO 0

SEQ ID NO: 115379 - protein, 297 aa, Arabidopsis thaliana; identical to SEQ ID NO: 23097
  peptide (1)..(297): Ceres Seq. ID no. 13614393

SEQ ID NO: 115380 - protein, 201 aa, Arabidopsis thaliana; identical to SEQ ID NO: 23098
  peptide (1)..(201): Ceres Seq. ID no. 13614394

SEQ ID NO: 115381 - DNA, 1598 bp, Arabidopsis thaliana; identical to SEQ ID NO: 104142
  misc_feature (1)..(1598): Ceres Seq. ID no. 13614395
  misc_feature (1)..(1598): Ortholog of  Ceres SEQ ID NO 13597260 as cited in SEQ ID NO 63885

SEQ ID NO: 115382 - protein, 423 aa, Arabidopsis thaliana; identical to SEQ ID NO: 104143
  peptide (1)..(423): Ceres Seq. ID no. 13614396

SEQ ID NO: 115383 - protein, 389 aa, Arabidopsis thaliana; identical to SEQ ID NO: 104144
  peptide (1)..(389): Ceres Seq. ID no. 13614397

SEQ ID NO: 115384 - protein, 365 aa, Arabidopsis thaliana; identical to SEQ ID NO: 104145
  peptide (1)..(365): Ceres Seq. ID no. 13614398

SEQ ID NO: 115385 - DNA, 1186 bp, Arabidopsis thaliana; identical to SEQ ID NO: 104146
  misc_feature (1)..(1186): Ceres Seq. ID no. 13614403
  misc_feature (1)..(1186): Ortholog of  Ceres SEQ ID NO 15179676 as cited in SEQ ID NO 52442
  misc_feature (1)..(1186): Ortholog of  Ceres SEQ ID NO 13582807 as cited in SEQ ID NO 67806

SEQ ID NO: 115386 - protein, 285 aa, Arabidopsis thaliana; identical to SEQ ID NO: 30327
  peptide (1)..(285): Ceres Seq. ID no. 13614404

SEQ ID NO: 115387 - protein, 196 aa, Arabidopsis thaliana; identical to SEQ ID NO: 30328
  peptide (1)..(196): Ceres Seq. ID no. 13614405

SEQ ID NO: 115388 - protein, 185 aa, Arabidopsis thaliana; identical to SEQ ID NO: 30329
  peptide (1)..(185): Ceres Seq. ID no. 13614406

SEQ ID NO: 115389 - DNA, 1097 bp, Arabidopsis thaliana; identical to SEQ ID NO: 104150
  misc_feature (1)..(1097): Ceres Seq. ID no. 13614413
  misc_feature (1)..(1097): Ortholog of  Ceres SEQ ID NO 13595084 as cited in SEQ ID NO 56095
  misc_feature (1)..(1097): Ortholog of  Ceres SEQ ID NO 13594252 as cited in SEQ ID NO 57528
  misc_feature (1)..(1097): Ortholog of  Ceres SEQ ID NO 13594430 as cited in SEQ ID NO 60181

SEQ ID NO: 115390 - protein, 200 aa, Arabidopsis thaliana; identical to SEQ ID NO: 23783
  peptide (1)..(200): Ceres Seq. ID no. 13614414

SEQ ID NO: 115391 - protein, 111 aa, Arabidopsis thaliana; identical to SEQ ID NO: 23784
  peptide (1)..(111): Ceres Seq. ID no. 13614415

SEQ ID NO: 115392 - DNA, 1132 bp, Arabidopsis thaliana; identical to SEQ ID NO: 104153
  misc_feature (1)..(1132): Ceres Seq. ID no. 13614416
  misc_feature (1)..(1132): Ortholog of  Ceres SEQ ID NO 14314640 as cited in SEQ ID NO 59941

SEQ ID NO: 115393 - protein, 285 aa, Arabidopsis thaliana; identical to SEQ ID NO: 39851
  peptide (1)..(285): Ceres Seq. ID no. 13614417

SEQ ID NO: 115394 - protein, 270 aa, Arabidopsis thaliana; identical to SEQ ID NO: 39852
  peptide (1)..(270): Ceres Seq. ID no. 13614418

SEQ ID NO: 115395 - protein, 258 aa, Arabidopsis thaliana; identical to SEQ ID NO: 39853
  peptide (1)..(258): Ceres Seq. ID no. 13614419

SEQ ID NO: 115396 - DNA, 1142 bp, Arabidopsis thaliana; identical to SEQ ID NO: 104157
  misc_feature (1)..(1142): Ceres Seq. ID no. 13614424
  misc_feature (1)..(1142): Ortholog of  Ceres SEQ ID NO 14305854 as cited in SEQ ID NO 52331
  misc_feature (1)..(1142): Ortholog of  Ceres SEQ ID NO 15168588 as cited in SEQ ID NO 60235

SEQ ID NO: 115397 - protein, 273 aa, Arabidopsis thaliana; identical to SEQ ID NO: 37506
  peptide (1)..(273): Ceres Seq. ID no. 13614425

SEQ ID NO: 115398 - protein, 268 aa, Arabidopsis thaliana; identical to SEQ ID NO: 37507
  peptide (1)..(268): Ceres Seq. ID no. 13614426

SEQ ID NO: 115399 - protein, 251 aa, Arabidopsis thaliana; identical to SEQ ID NO: 37508
  peptide (1)..(251): Ceres Seq. ID no. 13614427

SEQ ID NO: 115400 - DNA, 1302 bp, Arabidopsis thaliana; identical to SEQ ID NO: 104161
  misc_feature (1)..(1302): Ceres Seq. ID no. 13614434
  misc_feature (1)..(1302): Ortholog of  Ceres SEQ ID NO 14315189 as cited in SEQ ID NO 57702

SEQ ID NO: 115401 - protein, 374 aa, Arabidopsis thaliana; identical to SEQ ID NO: 104162
  peptide (1)..(374): Ceres Seq. ID no. 13614435

SEQ ID NO: 115402 - protein, 354 aa, Arabidopsis thaliana; identical to SEQ ID NO: 24286
  peptide (1)..(354): Ceres Seq. ID no. 13614436

SEQ ID NO: 115403 - protein, 320 aa, Arabidopsis thaliana; identical to SEQ ID NO: 24287
  peptide (1)..(320): Ceres Seq. ID no. 13614437

SEQ ID NO: 115404 - DNA, 1644 bp, Arabidopsis thaliana; identical to SEQ ID NO: 104165
  misc_feature (1)..(1644): Ceres Seq. ID no. 13614442
  misc_feature (1)..(1644): Ortholog of  Ceres SEQ ID NO 14303850 as cited in SEQ ID NO 53464
  misc_feature (1)..(1644): Ortholog of  Ceres SEQ ID NO 13656177 as cited in SEQ ID NO 64997

SEQ ID NO: 115405 - protein, 408 aa, Arabidopsis thaliana; identical to SEQ ID NO: 28696
  peptide (1)..(408): Ceres Seq. ID no. 13614443

SEQ ID NO: 115406 - protein, 391 aa, Arabidopsis thaliana; identical to SEQ ID NO: 28697
  peptide (1)..(391): Ceres Seq. ID no. 13614444

SEQ ID NO: 115407 - protein, 369 aa, Arabidopsis thaliana; identical to SEQ ID NO: 28698
  peptide (1)..(369): Ceres Seq. ID no. 13614445

SEQ ID NO: 115408 - DNA, 1335 bp, Arabidopsis thaliana; identical to SEQ ID NO: 104169
  misc_feature (1)..(1335): Ceres Seq. ID no. 13614446
  misc_feature (1)..(1335): Ortholog of  Ceres SEQ ID NO 12614832 as cited in SEQ ID NO 68844

SEQ ID NO: 115409 - protein, 340 aa, Arabidopsis thaliana; identical to SEQ ID NO: 39651
  peptide (1)..(340): Ceres Seq. ID no. 13614447

SEQ ID NO: 115410 - protein, 338 aa, Arabidopsis thaliana; identical to SEQ ID NO: 39652
  peptide (1)..(338): Ceres Seq. ID no. 13614448

SEQ ID NO: 115411 - protein, 229 aa, Arabidopsis thaliana; identical to SEQ ID NO: 39653
  peptide (1)..(229): Ceres Seq. ID no. 13614449

SEQ ID NO: 115412 - DNA, 1396 bp, Arabidopsis thaliana; identical to SEQ ID NO: 104173
  misc_feature (1)..(1396): Ceres Seq. ID no. 13614450
  misc_feature (1)..(1396): Ortholog of  Ceres SEQ ID NO 14312208 as cited in SEQ ID NO 54845
  misc_feature (1)..(1396): Ortholog of  Ceres SEQ ID NO 15171755 as cited in SEQ ID NO 57047
  misc_feature (1)..(1396): Ortholog of  Ceres SEQ ID NO 13597613 as cited in SEQ ID NO 65334
  misc_feature (1)..(1396): Ortholog of  Ceres SEQ ID NO 13655958 as cited in SEQ ID NO 65456
  misc_feature (1)..(1396): Ortholog of  Ceres SEQ ID NO 14303664 as cited in SEQ ID NO 65892
  misc_feature (1)..(1396): Ortholog of  Ceres SEQ ID NO 15178832 as cited in SEQ ID NO 0

SEQ ID NO: 115413 - protein, 386 aa, Arabidopsis thaliana; identical to SEQ ID NO: 104174
  peptide (1)..(386): Ceres Seq. ID no. 13614451

SEQ ID NO: 115414 - protein, 328 aa, Arabidopsis thaliana; identical to SEQ ID NO: 22707
  peptide (1)..(328): Ceres Seq. ID no. 13614452

SEQ ID NO: 115415 - protein, 309 aa, Arabidopsis thaliana; identical to SEQ ID NO: 22708
  peptide (1)..(309): Ceres Seq. ID no. 13614453

SEQ ID NO: 115416 - DNA, 1849 bp, Arabidopsis thaliana; identical to SEQ ID NO: 104177
  misc_feature (1)..(1849): Ceres Seq. ID no. 13614454
  misc_feature (1)..(1849): Ortholog of  Ceres SEQ ID NO 13595529 as cited in SEQ ID NO 56687

SEQ ID NO: 115417 - protein, 434 aa, Arabidopsis thaliana; identical to SEQ ID NO: 43737
  peptide (1)..(434): Ceres Seq. ID no. 13614455

SEQ ID NO: 115418 - protein, 285 aa, Arabidopsis thaliana; identical to SEQ ID NO: 43738
  peptide (1)..(285): Ceres Seq. ID no. 13614456

SEQ ID NO: 115419 - protein, 236 aa, Arabidopsis thaliana; identical to SEQ ID NO: 43739
  peptide (1)..(236): Ceres Seq. ID no. 13614457

SEQ ID NO: 115420 - DNA, 1000 bp, Arabidopsis thaliana; identical to SEQ ID NO: 104181
  misc_feature (1)..(1000): Ceres Seq. ID no. 13614462
  misc_feature (1)..(1000): Ortholog of  Ceres SEQ ID NO 15169786 as cited in SEQ ID NO 59711

SEQ ID NO: 115421 - protein, 220 aa, Arabidopsis thaliana; identical to SEQ ID NO: 26322
  peptide (1)..(220): Ceres Seq. ID no. 13614463

SEQ ID NO: 115422 - protein, 206 aa, Arabidopsis thaliana; identical to SEQ ID NO: 26323
  peptide (1)..(206): Ceres Seq. ID no. 13614464

SEQ ID NO: 115423 - protein, 145 aa, Arabidopsis thaliana; identical to SEQ ID NO: 26324
  peptide (1)..(145): Ceres Seq. ID no. 13614465

SEQ ID NO: 115424 - DNA, 1197 bp, Arabidopsis thaliana; identical to SEQ ID NO: 104185
  misc_feature (1)..(1197): Ceres Seq. ID no. 13614466
  misc_feature (1)..(1197): Ortholog of  Ceres SEQ ID NO 12465955 as cited in SEQ ID NO 147

SEQ ID NO: 115425 - protein, 301 aa, Arabidopsis thaliana; identical to SEQ ID NO: 104186
  peptide (1)..(301): Ceres Seq. ID no. 13614467

SEQ ID NO: 115426 - protein, 255 aa, Arabidopsis thaliana; identical to SEQ ID NO: 35201
  peptide (1)..(255): Ceres Seq. ID no. 13614468

SEQ ID NO: 115427 - protein, 209 aa, Arabidopsis thaliana; identical to SEQ ID NO: 35202
  peptide (1)..(209): Ceres Seq. ID no. 13614469

SEQ ID NO: 115428 - DNA, 1014 bp, Arabidopsis thaliana; identical to SEQ ID NO: 104189
  misc_feature (1)..(1014): Ceres Seq. ID no. 13614470
  misc_feature (1)..(1014): Ortholog of  Ceres SEQ ID NO 12465955 as cited in SEQ ID NO 147

SEQ ID NO: 115429 - protein, 304 aa, Arabidopsis thaliana; identical to SEQ ID NO: 104190
  peptide (1)..(304): Ceres Seq. ID no. 13614471

SEQ ID NO: 115430 - protein, 296 aa, Arabidopsis thaliana; identical to SEQ ID NO: 104191
  peptide (1)..(296): Ceres Seq. ID no. 13614472

SEQ ID NO: 115431 - protein, 250 aa, Arabidopsis thaliana; identical to SEQ ID NO: 104192
  peptide (1)..(250): Ceres Seq. ID no. 13614473

SEQ ID NO: 115432 - DNA, 1388 bp, Arabidopsis thaliana; identical to SEQ ID NO: 104193
  misc_feature (1)..(1388): Ceres Seq. ID no. 13614482
  misc_feature (1)..(1388): Ortholog of  Ceres SEQ ID NO 13598351 as cited in SEQ ID NO 68715
  misc_feature (1)..(1388): Ortholog of  Ceres SEQ ID NO 13584744 as cited in SEQ ID NO 69137

SEQ ID NO: 115433 - protein, 361 aa, Arabidopsis thaliana; identical to SEQ ID NO: 104194
  peptide (1)..(361): Ceres Seq. ID no. 13614483

SEQ ID NO: 115434 - protein, 247 aa, Arabidopsis thaliana; identical to SEQ ID NO: 104195
  peptide (1)..(247): Ceres Seq. ID no. 13614484

SEQ ID NO: 115435 - protein, 222 aa, Arabidopsis thaliana; identical to SEQ ID NO: 104196
  peptide (1)..(222): Ceres Seq. ID no. 13614485

SEQ ID NO: 115436 - DNA, 892 bp, Arabidopsis thaliana; identical to SEQ ID NO: 104197
  misc_feature (1)..(892): Ceres Seq. ID no. 13614496
  misc_feature (1)..(892): Ortholog of  Ceres SEQ ID NO 13660094 as cited in SEQ ID NO 60820

SEQ ID NO: 115437 - protein, 238 aa, Arabidopsis thaliana; identical to SEQ ID NO: 104198
  peptide (1)..(238): Ceres Seq. ID no. 13614497

SEQ ID NO: 115438 - protein, 206 aa, Arabidopsis thaliana; identical to SEQ ID NO: 40608
  peptide (1)..(206): Ceres Seq. ID no. 13614498

SEQ ID NO: 115439 - protein, 182 aa, Arabidopsis thaliana; identical to SEQ ID NO: 40609
  peptide (1)..(182): Ceres Seq. ID no. 13614499

SEQ ID NO: 115440 - DNA, 1927 bp, Arabidopsis thaliana; identical to SEQ ID NO: 104201
  misc_feature (1)..(1927): Ceres Seq. ID no. 13614504
  misc_feature (1)..(1927): Ortholog of  Ceres SEQ ID NO 12613725 as cited in SEQ ID NO 68196
  misc_feature (1)..(1927): Ortholog of  Ceres SEQ ID NO 14301486 as cited in SEQ ID NO 69222

SEQ ID NO: 115441 - protein, 591 aa, Arabidopsis thaliana; identical to SEQ ID NO: 23568
  peptide (1)..(591): Ceres Seq. ID no. 13614505

SEQ ID NO: 115442 - protein, 562 aa, Arabidopsis thaliana; identical to SEQ ID NO: 23569
  peptide (1)..(562): Ceres Seq. ID no. 13614506

SEQ ID NO: 115443 - protein, 541 aa, Arabidopsis thaliana; identical to SEQ ID NO: 23570
  peptide (1)..(541): Ceres Seq. ID no. 13614507

SEQ ID NO: 115444 - DNA, 1536 bp, Arabidopsis thaliana; identical to SEQ ID NO: 104205
  misc_feature (1)..(1536): Ceres Seq. ID no. 13614515
  misc_feature (1)..(1536): Ortholog of  Ceres SEQ ID NO 14314636 as cited in SEQ ID NO 56924
  misc_feature (1)..(1536): Ortholog of  Ceres SEQ ID NO 13594345 as cited in SEQ ID NO 58043
  misc_feature (1)..(1536): Ortholog of  Ceres SEQ ID NO 15168421 as cited in SEQ ID NO 60131
  misc_feature (1)..(1536): Ortholog of  Ceres SEQ ID NO 13597574 as cited in SEQ ID NO 64677
  misc_feature (1)..(1536): Ortholog of  Ceres SEQ ID NO 13597843 as cited in SEQ ID NO 64850
  misc_feature (1)..(1536): Ortholog of  Ceres SEQ ID NO 13597678 as cited in SEQ ID NO 65375
  misc_feature (1)..(1536): Ortholog of  Ceres SEQ ID NO 15176787 as cited in SEQ ID NO 66468
  misc_feature (1)..(1536): Ortholog of  Ceres SEQ ID NO 13596180 as cited in SEQ ID NO 67941
  misc_feature (1)..(1536): Ortholog of  Ceres SEQ ID NO 13591190 as cited in SEQ ID NO 68044
  misc_feature (1)..(1536): Ortholog of  Ceres SEQ ID NO 13595961 as cited in SEQ ID NO 68223

SEQ ID NO: 115445 - protein, 468 aa, Arabidopsis thaliana; identical to SEQ ID NO: 104206
  peptide (1)..(468): Ceres Seq. ID no. 13614516

SEQ ID NO: 115446 - protein, 462 aa, Arabidopsis thaliana; identical to SEQ ID NO: 37909
  peptide (1)..(462): Ceres Seq. ID no. 13614517

SEQ ID NO: 115447 - protein, 443 aa, Arabidopsis thaliana; identical to SEQ ID NO: 37910
  peptide (1)..(443): Ceres Seq. ID no. 13614518

SEQ ID NO: 115448 - DNA, 1390 bp, Arabidopsis thaliana; identical to SEQ ID NO: 104209
  misc_feature (1)..(1390): Ceres Seq. ID no. 13614527
  misc_feature (1)..(1390): Ortholog of  Ceres SEQ ID NO 13639246 as cited in SEQ ID NO 56576

SEQ ID NO: 115449 - protein, 304 aa, Arabidopsis thaliana; identical to SEQ ID NO: 26941
  peptide (1)..(304): Ceres Seq. ID no. 13614528

SEQ ID NO: 115450 - protein, 279 aa, Arabidopsis thaliana; identical to SEQ ID NO: 26942
  peptide (1)..(279): Ceres Seq. ID no. 13614529

SEQ ID NO: 115451 - protein, 274 aa, Arabidopsis thaliana; identical to SEQ ID NO: 26943
  peptide (1)..(274): Ceres Seq. ID no. 13614530

SEQ ID NO: 115452 - DNA, 828 bp, Arabidopsis thaliana; identical to SEQ ID NO: 104213
  misc_feature (1)..(828): Ceres Seq. ID no. 13614535
  misc_feature (1)..(828): Ortholog of  Ceres SEQ ID NO 15177927 as cited in SEQ ID NO 1170
  misc_feature (1)..(828): Ortholog of  Ceres SEQ ID NO 13596295 as cited in SEQ ID NO 68019

SEQ ID NO: 115453 - protein, 228 aa, Arabidopsis thaliana; identical to SEQ ID NO: 20979
  peptide (1)..(228): Ceres Seq. ID no. 13614536

SEQ ID NO: 115454 - protein, 209 aa, Arabidopsis thaliana; identical to SEQ ID NO: 20980
  peptide (1)..(209): Ceres Seq. ID no. 13614537

SEQ ID NO: 115455 - protein, 195 aa, Arabidopsis thaliana; identical to SEQ ID NO: 20981
  peptide (1)..(195): Ceres Seq. ID no. 13614538

SEQ ID NO: 115456 - DNA, 1222 bp, Arabidopsis thaliana; identical to SEQ ID NO: 104217
  misc_feature (1)..(1222): Ceres Seq. ID no. 13614547
  misc_feature (1)..(1222): Ortholog of  Ceres SEQ ID NO 14307280 as cited in SEQ ID NO 59443
  misc_feature (1)..(1222): Ortholog of  Ceres SEQ ID NO 14316536 as cited in SEQ ID NO 60272
  misc_feature (1)..(1222): Ortholog of  Ceres SEQ ID NO 13598570 as cited in SEQ ID NO 65434
  misc_feature (1)..(1222): Ortholog of  Ceres SEQ ID NO 13660333 as cited in SEQ ID NO 67464
  misc_feature (1)..(1222): Ortholog of  Ceres SEQ ID NO 13596238 as cited in SEQ ID NO 68834

SEQ ID NO: 115457 - protein, 349 aa, Arabidopsis thaliana; identical to SEQ ID NO: 42183
  peptide (1)..(349): Ceres Seq. ID no. 13614548

SEQ ID NO: 115458 - protein, 348 aa, Arabidopsis thaliana; identical to SEQ ID NO: 42184
  peptide (1)..(348): Ceres Seq. ID no. 13614549

SEQ ID NO: 115459 - protein, 333 aa, Arabidopsis thaliana; identical to SEQ ID NO: 42185
  peptide (1)..(333): Ceres Seq. ID no. 13614550

SEQ ID NO: 115460 - DNA, 1591 bp, Arabidopsis thaliana; identical to SEQ ID NO: 104221
  misc_feature (1)..(1591): Ceres Seq. ID no. 13614572
  misc_feature (1)..(1591): Ortholog of  Ceres SEQ ID NO 13595142 as cited in SEQ ID NO 56671
  misc_feature (1)..(1591): Ortholog of  Ceres SEQ ID NO 15168569 as cited in SEQ ID NO 58123
  misc_feature (1)..(1591): Ortholog of  Ceres SEQ ID NO 13598460 as cited in SEQ ID NO 63382

SEQ ID NO: 115461 - protein, 410 aa, Arabidopsis thaliana; identical to SEQ ID NO: 104222
  peptide (1)..(410): Ceres Seq. ID no. 13614573

SEQ ID NO: 115462 - protein, 367 aa, Arabidopsis thaliana; identical to SEQ ID NO: 104223
  peptide (1)..(367): Ceres Seq. ID no. 13614574

SEQ ID NO: 115463 - protein, 278 aa, Arabidopsis thaliana; identical to SEQ ID NO: 104224
  peptide (1)..(278): Ceres Seq. ID no. 13614575

SEQ ID NO: 115464 - DNA, 1154 bp, Arabidopsis thaliana; identical to SEQ ID NO: 104225
  misc_feature (1)..(1154): Ceres Seq. ID no. 13614576
  misc_feature (1)..(1154): Ortholog of  Ceres SEQ ID NO 15178809 as cited in SEQ ID NO 401
  misc_feature (1)..(1154): Ortholog of  Ceres SEQ ID NO 15177055 as cited in SEQ ID NO 57450
  misc_feature (1)..(1154): Ortholog of  Ceres SEQ ID NO 12615854 as cited in SEQ ID NO 62880

SEQ ID NO: 115465 - protein, 279 aa, Arabidopsis thaliana; identical to SEQ ID NO: 28018
  peptide (1)..(279): Ceres Seq. ID no. 13614577

SEQ ID NO: 115466 - DNA, 729 bp, Arabidopsis thaliana; identical to SEQ ID NO: 104227
  misc_feature (1)..(729): Ceres Seq. ID no. 13614582
  misc_feature (1)..(729): Ortholog of  Ceres SEQ ID NO 15179121 as cited in SEQ ID NO 0

SEQ ID NO: 115467 - protein, 169 aa, Arabidopsis thaliana; identical to SEQ ID NO: 104228
  peptide (1)..(169): Ceres Seq. ID no. 13614583

SEQ ID NO: 115468 - protein, 112 aa, Arabidopsis thaliana; identical to SEQ ID NO: 25693
  peptide (1)..(112): Ceres Seq. ID no. 13614584

SEQ ID NO: 115469 - protein, 102 aa, Arabidopsis thaliana; identical to SEQ ID NO: 25694
  peptide (1)..(102): Ceres Seq. ID no. 13614585

SEQ ID NO: 115470 - DNA, 1323 bp, Arabidopsis thaliana; identical to SEQ ID NO: 104231
  misc_feature (1)..(1323): Ceres Seq. ID no. 13614590
  misc_feature (1)..(1323): Ortholog of  Ceres SEQ ID NO 13596891 as cited in SEQ ID NO 62868
  misc_feature (1)..(1323): Ortholog of  Ceres SEQ ID NO 12617235 as cited in SEQ ID NO 63990
  misc_feature (1)..(1323): Ortholog of  Ceres SEQ ID NO 13655371 as cited in SEQ ID NO 68945

SEQ ID NO: 115471 - protein, 346 aa, Arabidopsis thaliana; identical to SEQ ID NO: 104232
  peptide (1)..(346): Ceres Seq. ID no. 13614591

SEQ ID NO: 115472 - protein, 307 aa, Arabidopsis thaliana; identical to SEQ ID NO: 104233
  peptide (1)..(307): Ceres Seq. ID no. 13614592

SEQ ID NO: 115473 - protein, 292 aa, Arabidopsis thaliana; identical to SEQ ID NO: 104234
  peptide (1)..(292): Ceres Seq. ID no. 13614593

SEQ ID NO: 115474 - DNA, 1334 bp, Arabidopsis thaliana; identical to SEQ ID NO: 104235
  misc_feature (1)..(1334): Ceres Seq. ID no. 13614594
  misc_feature (1)..(1334): Ortholog of  Ceres SEQ ID NO 13596891 as cited in SEQ ID NO 62868
  misc_feature (1)..(1334): Ortholog of  Ceres SEQ ID NO 12617235 as cited in SEQ ID NO 63990
  misc_feature (1)..(1334): Ortholog of  Ceres SEQ ID NO 13655371 as cited in SEQ ID NO 68945

SEQ ID NO: 115475 - protein, 343 aa, Arabidopsis thaliana; identical to SEQ ID NO: 43475
  peptide (1)..(343): Ceres Seq. ID no. 13614595

SEQ ID NO: 115476 - protein, 291 aa, Arabidopsis thaliana; identical to SEQ ID NO: 43476
  peptide (1)..(291): Ceres Seq. ID no. 13614596

SEQ ID NO: 115477 - protein, 287 aa, Arabidopsis thaliana; identical to SEQ ID NO: 43477
  peptide (1)..(287): Ceres Seq. ID no. 13614597

SEQ ID NO: 115478 - DNA, 1210 bp, Arabidopsis thaliana; identical to SEQ ID NO: 104239
  misc_feature (1)..(1210): Ceres Seq. ID no. 13614616
  misc_feature (1)..(1210): Ortholog of  Ceres SEQ ID NO 13659643 as cited in SEQ ID NO 67106

SEQ ID NO: 115479 - protein, 325 aa, Arabidopsis thaliana; identical to SEQ ID NO: 104240
  peptide (1)..(325): Ceres Seq. ID no. 13614617

SEQ ID NO: 115480 - protein, 276 aa, Arabidopsis thaliana; identical to SEQ ID NO: 104241
  peptide (1)..(276): Ceres Seq. ID no. 13614618

SEQ ID NO: 115481 - protein, 172 aa, Arabidopsis thaliana; identical to SEQ ID NO: 27558
  peptide (1)..(172): Ceres Seq. ID no. 13614619

SEQ ID NO: 115482 - DNA, 1394 bp, Arabidopsis thaliana; identical to SEQ ID NO: 104243
  misc_feature (1)..(1394): Ceres Seq. ID no. 13614628
  misc_feature (1)..(1394): Ortholog of  Ceres SEQ ID NO 13661015 as cited in SEQ ID NO 60921
  misc_feature (1)..(1394): Ortholog of  Ceres SEQ ID NO 13596304 as cited in SEQ ID NO 69269

SEQ ID NO: 115483 - protein, 289 aa, Arabidopsis thaliana; identical to SEQ ID NO: 39290
  peptide (1)..(289): Ceres Seq. ID no. 13614629

SEQ ID NO: 115484 - protein, 226 aa, Arabidopsis thaliana; identical to SEQ ID NO: 39291
  peptide (1)..(226): Ceres Seq. ID no. 13614630

SEQ ID NO: 115485 - protein, 192 aa, Arabidopsis thaliana; identical to SEQ ID NO: 39292
  peptide (1)..(192): Ceres Seq. ID no. 13614631

SEQ ID NO: 115486 - DNA, 1430 bp, Arabidopsis thaliana; identical to SEQ ID NO: 104247
  misc_feature (1)..(1430): Ceres Seq. ID no. 13614640
  misc_feature (1)..(1430): Ortholog of  Ceres SEQ ID NO 15168965 as cited in SEQ ID NO 20607
  misc_feature (1)..(1430): Ortholog of  Ceres SEQ ID NO 13597454 as cited in SEQ ID NO 64121
  misc_feature (1)..(1430): Ortholog of  Ceres SEQ ID NO 13623385 as cited in SEQ ID NO 0

SEQ ID NO: 115487 - protein, 429 aa, Arabidopsis thaliana; identical to SEQ ID NO: 26568
  peptide (1)..(429): Ceres Seq. ID no. 13614641

SEQ ID NO: 115488 - protein, 423 aa, Arabidopsis thaliana; identical to SEQ ID NO: 26569
  peptide (1)..(423): Ceres Seq. ID no. 13614642

SEQ ID NO: 115489 - protein, 236 aa, Arabidopsis thaliana; identical to SEQ ID NO: 26570
  peptide (1)..(236): Ceres Seq. ID no. 13614643

SEQ ID NO: 115490 - DNA, 1161 bp, Arabidopsis thaliana; identical to SEQ ID NO: 104251
  misc_feature (1)..(1161): Ceres Seq. ID no. 13614644
  misc_feature (1)..(1161): Ortholog of  Ceres SEQ ID NO 12608620 as cited in SEQ ID NO 60192
  misc_feature (1)..(1161): Ortholog of  Ceres SEQ ID NO 13662898 as cited in SEQ ID NO 66199
  misc_feature (1)..(1161): Ortholog of  Ceres SEQ ID NO 14313358 as cited in SEQ ID NO 67347
  misc_feature (1)..(1161): Ortholog of  Ceres SEQ ID NO 13654314 as cited in SEQ ID NO 67914

SEQ ID NO: 115491 - protein, 281 aa, Arabidopsis thaliana; identical to SEQ ID NO: 104252
  peptide (1)..(281): Ceres Seq. ID no. 13614645

SEQ ID NO: 115492 - protein, 226 aa, Arabidopsis thaliana; identical to SEQ ID NO: 104253
  peptide (1)..(226): Ceres Seq. ID no. 13614646

SEQ ID NO: 115493 - DNA, 1049 bp, Arabidopsis thaliana; identical to SEQ ID NO: 104254
  misc_feature (1)..(1049): Ceres Seq. ID no. 13614651
  misc_feature (1)..(1049): Ortholog of  Ceres SEQ ID NO 13638658 as cited in SEQ ID NO 51921
  misc_feature (1)..(1049): Ortholog of  Ceres SEQ ID NO 14306522 as cited in SEQ ID NO 53365
  misc_feature (1)..(1049): Ortholog of  Ceres SEQ ID NO 15175175 as cited in SEQ ID NO 0

SEQ ID NO: 115494 - protein, 258 aa, Arabidopsis thaliana; identical to SEQ ID NO: 104255
  peptide (1)..(258): Ceres Seq. ID no. 13614652

SEQ ID NO: 115495 - protein, 205 aa, Arabidopsis thaliana; identical to SEQ ID NO: 104256
  peptide (1)..(205): Ceres Seq. ID no. 13614653

SEQ ID NO: 115496 - DNA, 2088 bp, Arabidopsis thaliana; identical to SEQ ID NO: 104257
  misc_feature (1)..(2088): Ceres Seq. ID no. 13614658
  misc_feature (1)..(2088): Ortholog of  Ceres SEQ ID NO 13659033 as cited in SEQ ID NO 66372
  misc_feature (1)..(2088): Ortholog of  Ceres SEQ ID NO 13655724 as cited in SEQ ID NO 68973

SEQ ID NO: 115497 - protein, 533 aa, Arabidopsis thaliana; identical to SEQ ID NO: 24504
  peptide (1)..(533): Ceres Seq. ID no. 13614659

SEQ ID NO: 115498 - protein, 332 aa, Arabidopsis thaliana; identical to SEQ ID NO: 24505
  peptide (1)..(332): Ceres Seq. ID no. 13614660

SEQ ID NO: 115499 - protein, 295 aa, Arabidopsis thaliana; identical to SEQ ID NO: 24506
  peptide (1)..(295): Ceres Seq. ID no. 13614661

SEQ ID NO: 115500 - DNA, 998 bp, Arabidopsis thaliana; identical to SEQ ID NO: 104261
  misc_feature (1)..(998): Ceres Seq. ID no. 13614662
  misc_feature (1)..(998): Ortholog of  Ceres SEQ ID NO 14301996 as cited in SEQ ID NO 56657

SEQ ID NO: 115501 - protein, 274 aa, Arabidopsis thaliana; identical to SEQ ID NO: 104262
  peptide (1)..(274): Ceres Seq. ID no. 13614663

SEQ ID NO: 115502 - protein, 239 aa, Arabidopsis thaliana; identical to SEQ ID NO: 29951
  peptide (1)..(239): Ceres Seq. ID no. 13614664

SEQ ID NO: 115503 - protein, 232 aa, Arabidopsis thaliana; identical to SEQ ID NO: 29952
  peptide (1)..(232): Ceres Seq. ID no. 13614665

SEQ ID NO: 115504 - DNA, 1166 bp, Arabidopsis thaliana; identical to SEQ ID NO: 104265
  misc_feature (1)..(1166): Ceres Seq. ID no. 13614666
  misc_feature (1)..(1166): Ortholog of  Ceres SEQ ID NO 12583421 as cited in SEQ ID NO 56410
  misc_feature (1)..(1166): Ortholog of  Ceres SEQ ID NO 13596876 as cited in SEQ ID NO 62696

SEQ ID NO: 115505 - protein, 308 aa, Arabidopsis thaliana; identical to SEQ ID NO: 104266
  peptide (1)..(308): Ceres Seq. ID no. 13614667

SEQ ID NO: 115506 - protein, 291 aa, Arabidopsis thaliana; identical to SEQ ID NO: 104267
  peptide (1)..(291): Ceres Seq. ID no. 13614668

SEQ ID NO: 115507 - protein, 280 aa, Arabidopsis thaliana; identical to SEQ ID NO: 104268
  peptide (1)..(280): Ceres Seq. ID no. 13614669

SEQ ID NO: 115508 - DNA, 844 bp, Arabidopsis thaliana; identical to SEQ ID NO: 104269
  misc_feature (1)..(844): Ceres Seq. ID no. 13614670
  misc_feature (1)..(844): Ortholog of  Ceres SEQ ID NO 12635789 as cited in SEQ ID NO 0

SEQ ID NO: 115509 - protein, 226 aa, Arabidopsis thaliana; identical to SEQ ID NO: 104270
  peptide (1)..(226): Ceres Seq. ID no. 13614671

SEQ ID NO: 115510 - protein, 207 aa, Arabidopsis thaliana; identical to SEQ ID NO: 104271
  peptide (1)..(207): Ceres Seq. ID no. 13614672

SEQ ID NO: 115511 - protein, 177 aa, Arabidopsis thaliana; identical to SEQ ID NO: 28487
  peptide (1)..(177): Ceres Seq. ID no. 13614673

SEQ ID NO: 115512 - DNA, 906 bp, Arabidopsis thaliana; identical to SEQ ID NO: 104273
  misc_feature (1)..(906): Ceres Seq. ID no. 13614682
  misc_feature (1)..(906): Ortholog of  Ceres SEQ ID NO 12609037 as cited in SEQ ID NO 51306
  misc_feature (1)..(906): Ortholog of  Ceres SEQ ID NO 12610391 as cited in SEQ ID NO 55942
  misc_feature (1)..(906): Ortholog of  Ceres SEQ ID NO 14309068 as cited in SEQ ID NO 0

SEQ ID NO: 115513 - protein, 236 aa, Arabidopsis thaliana; identical to SEQ ID NO: 36829
  peptide (1)..(236): Ceres Seq. ID no. 13614683

SEQ ID NO: 115514 - protein, 224 aa, Arabidopsis thaliana; identical to SEQ ID NO: 36830
  peptide (1)..(224): Ceres Seq. ID no. 13614684

SEQ ID NO: 115515 - protein, 155 aa, Arabidopsis thaliana; identical to SEQ ID NO: 36831
  peptide (1)..(155): Ceres Seq. ID no. 13614685

SEQ ID NO: 115516 - DNA, 1811 bp, Arabidopsis thaliana; identical to SEQ ID NO: 104277
  misc_feature (1)..(1811): Ceres Seq. ID no. 13614686
  misc_feature (1)..(1811): Ortholog of  Ceres SEQ ID NO 15176223 as cited in SEQ ID NO 51535
  misc_feature (1)..(1811): Ortholog of  Ceres SEQ ID NO 15171193 as cited in SEQ ID NO 59370
  misc_feature (1)..(1811): Ortholog of  Ceres SEQ ID NO 13597198 as cited in SEQ ID NO 63665

SEQ ID NO: 115517 - protein, 506 aa, Arabidopsis thaliana; identical to SEQ ID NO: 22426
  peptide (1)..(506): Ceres Seq. ID no. 13614687

SEQ ID NO: 115518 - protein, 495 aa, Arabidopsis thaliana; identical to SEQ ID NO: 22427
  peptide (1)..(495): Ceres Seq. ID no. 13614688

SEQ ID NO: 115519 - protein, 418 aa, Arabidopsis thaliana; identical to SEQ ID NO: 22428
  peptide (1)..(418): Ceres Seq. ID no. 13614689

SEQ ID NO: 115520 - DNA, 847 bp, Arabidopsis thaliana; identical to SEQ ID NO: 104281
  misc_feature (1)..(847): Ceres Seq. ID no. 13614690
  misc_feature (1)..(847): Ortholog of  Ceres SEQ ID NO 13581670 as cited in SEQ ID NO 57766

SEQ ID NO: 115521 - protein, 133 aa, Arabidopsis thaliana; identical to SEQ ID NO: 104282
  peptide (1)..(133): Ceres Seq. ID no. 13614691

SEQ ID NO: 115522 - protein, 93 aa, Arabidopsis thaliana; identical to SEQ ID NO: 104283
  peptide (1)..(93): Ceres Seq. ID no. 13614692

SEQ ID NO: 115523 - protein, 66 aa, Arabidopsis thaliana; identical to SEQ ID NO: 104284
  peptide (1)..(66): Ceres Seq. ID no. 13614693

SEQ ID NO: 115524 - DNA, 815 bp, Arabidopsis thaliana; identical to SEQ ID NO: 104285
  misc_feature (1)..(815): Ceres Seq. ID no. 13614698
  misc_feature (1)..(815): Ortholog of  Ceres SEQ ID NO 14307801 as cited in SEQ ID NO 59512
  misc_feature (1)..(815): Ortholog of  Ceres SEQ ID NO 14309110 as cited in SEQ ID NO 0

SEQ ID NO: 115525 - protein, 228 aa, Arabidopsis thaliana; identical to SEQ ID NO: 104286
  peptide (1)..(228): Ceres Seq. ID no. 13614699

SEQ ID NO: 115526 - protein, 221 aa, Arabidopsis thaliana; identical to SEQ ID NO: 104287
  peptide (1)..(221): Ceres Seq. ID no. 13614700

SEQ ID NO: 115527 - protein, 127 aa, Arabidopsis thaliana; identical to SEQ ID NO: 76250
  peptide (1)..(127): Ceres Seq. ID no. 13614701

SEQ ID NO: 115528 - DNA, 1356 bp, Arabidopsis thaliana; identical to SEQ ID NO: 104289
  misc_feature (1)..(1356): Ceres Seq. ID no. 13614702
  misc_feature (1)..(1356): Ortholog of  Ceres SEQ ID NO 14304245 as cited in SEQ ID NO 53346

SEQ ID NO: 115529 - protein, 301 aa, Arabidopsis thaliana; identical to SEQ ID NO: 25868
  peptide (1)..(301): Ceres Seq. ID no. 13614703

SEQ ID NO: 115530 - protein, 217 aa, Arabidopsis thaliana; identical to SEQ ID NO: 25869
  peptide (1)..(217): Ceres Seq. ID no. 13614704

SEQ ID NO: 115531 - protein, 155 aa, Arabidopsis thaliana; identical to SEQ ID NO: 25870
  peptide (1)..(155): Ceres Seq. ID no. 13614705

SEQ ID NO: 115532 - DNA, 2007 bp, Arabidopsis thaliana; identical to SEQ ID NO: 104293
  misc_feature (1)..(2007): Ceres Seq. ID no. 13614709
  misc_feature (1)..(2007): Ortholog of  Ceres SEQ ID NO 14315045 as cited in SEQ ID NO 52345
  misc_feature (1)..(2007): Ortholog of  Ceres SEQ ID NO 15170171 as cited in SEQ ID NO 67284

SEQ ID NO: 115533 - protein, 570 aa, Arabidopsis thaliana; identical to SEQ ID NO: 104294
  peptide (1)..(570): Ceres Seq. ID no. 13614710

SEQ ID NO: 115534 - protein, 568 aa, Arabidopsis thaliana; identical to SEQ ID NO: 104295
  peptide (1)..(568): Ceres Seq. ID no. 13614711

SEQ ID NO: 115535 - protein, 397 aa, Arabidopsis thaliana; identical to SEQ ID NO: 104296
  peptide (1)..(397): Ceres Seq. ID no. 13614712

SEQ ID NO: 115536 - DNA, 1234 bp, Arabidopsis thaliana; identical to SEQ ID NO: 104297
  misc_feature (1)..(1234): Ceres Seq. ID no. 13614725
  misc_feature (1)..(1234): Ortholog of  Ceres SEQ ID NO 15171556 as cited in SEQ ID NO 59687
  misc_feature (1)..(1234): Ortholog of  Ceres SEQ ID NO 15177935 as cited in SEQ ID NO 60258
  misc_feature (1)..(1234): Ortholog of  Ceres SEQ ID NO 13659033 as cited in SEQ ID NO 66372
  misc_feature (1)..(1234): Ortholog of  Ceres SEQ ID NO 12625899 as cited in SEQ ID NO 69079
  misc_feature (1)..(1234): Ortholog of  Ceres SEQ ID NO 15180051 as cited in SEQ ID NO 0

SEQ ID NO: 115537 - protein, 388 aa, Arabidopsis thaliana; identical to SEQ ID NO: 104298
  peptide (1)..(388): Ceres Seq. ID no. 13614726

SEQ ID NO: 115538 - protein, 367 aa, Arabidopsis thaliana; identical to SEQ ID NO: 104299
  peptide (1)..(367): Ceres Seq. ID no. 13614727

SEQ ID NO: 115539 - protein, 257 aa, Arabidopsis thaliana; identical to SEQ ID NO: 104300
  peptide (1)..(257): Ceres Seq. ID no. 13614728

SEQ ID NO: 115540 - DNA, 1132 bp, Arabidopsis thaliana; identical to SEQ ID NO: 104301
  misc_feature (1)..(1132): Ceres Seq. ID no. 13614729
  misc_feature (1)..(1132): Ortholog of  Ceres SEQ ID NO 13504028 as cited in SEQ ID NO 56107

SEQ ID NO: 115541 - protein, 241 aa, Arabidopsis thaliana [sequence omitted]

SEQ ID NO: 115542 - protein, 153 aa, Arabidopsis thaliana; identical to SEQ ID NO: 40249
  peptide (1)..(153): Ceres Seq. ID no. 13614731

SEQ ID NO: 115543 - protein, 148 aa, Arabidopsis thaliana; identical to SEQ ID NO: 40250
  peptide (1)..(148): Ceres Seq. ID no. 13614732

SEQ ID NO: 115544 - DNA, 1523 bp, Arabidopsis thaliana; identical to SEQ ID NO: 104305
  misc_feature (1)..(1523): Ceres Seq. ID no. 13614733
  misc_feature (1)..(1523): Ortholog of  Ceres SEQ ID NO 15176835 as cited in SEQ ID NO 1046
  misc_feature (1)..(1523): Ortholog of  Ceres SEQ ID NO 14315403 as cited in SEQ ID NO 59259

SEQ ID NO: 115545 - protein, 429 aa, Arabidopsis thaliana; identical to SEQ ID NO: 26234
  peptide (1)..(429): Ceres Seq. ID no. 13614734

SEQ ID NO: 115546 - protein, 415 aa, Arabidopsis thaliana; identical to SEQ ID NO: 26235
  peptide (1)..(415): Ceres Seq. ID no. 13614735

SEQ ID NO: 115547 - protein, 412 aa, Arabidopsis thaliana; identical to SEQ ID NO: 26236
  peptide (1)..(412): Ceres Seq. ID no. 13614736

SEQ ID NO: 115548 - DNA, 850 bp, Arabidopsis thaliana; identical to SEQ ID NO: 104309
  misc_feature (1)..(850): Ceres Seq. ID no. 13614744
  misc_feature (1)..(850): Ortholog of  Ceres SEQ ID NO 15169858 as cited in SEQ ID NO 55543

SEQ ID NO: 115549 - protein, 267 aa, Arabidopsis thaliana; identical to SEQ ID NO: 104310
  peptide (1)..(267): Ceres Seq. ID no. 13614745

SEQ ID NO: 115550 - protein, 205 aa, Arabidopsis thaliana; identical to SEQ ID NO: 104311
  peptide (1)..(205): Ceres Seq. ID no. 13614746

SEQ ID NO: 115551 - protein, 200 aa, Arabidopsis thaliana; identical to SEQ ID NO: 104312
  peptide (1)..(200): Ceres Seq. ID no. 13614747

SEQ ID NO: 115552 - DNA, 802 bp, Arabidopsis thaliana; identical to SEQ ID NO: 104313
  misc_feature (1)..(802): Ceres Seq. ID no. 13614752
  misc_feature (1)..(802): Ortholog of  Ceres SEQ ID NO 13584646 as cited in SEQ ID NO 60715

SEQ ID NO: 115553 - protein, 266 aa, Arabidopsis thaliana; identical to SEQ ID NO: 104314
  peptide (1)..(266): Ceres Seq. ID no. 13614753

SEQ ID NO: 115554 - protein, 257 aa, Arabidopsis thaliana; identical to SEQ ID NO: 104315
  peptide (1)..(257): Ceres Seq. ID no. 13614754

SEQ ID NO: 115555 - protein, 239 aa, Arabidopsis thaliana; identical to SEQ ID NO: 104316
  peptide (1)..(239): Ceres Seq. ID no. 13614755

SEQ ID NO: 115556 - DNA, 940 bp, Arabidopsis thaliana; identical to SEQ ID NO: 104317
  misc_feature (1)..(940): Ceres Seq. ID no. 13614760
  misc_feature (1)..(940): Ortholog of  Ceres SEQ ID NO 13654054 as cited in SEQ ID NO 67735
  misc_feature (1)..(940): Ortholog of  Ceres SEQ ID NO 15180245 as cited in SEQ ID NO 0

SEQ ID NO: 115557 - protein, 282 aa, Arabidopsis thaliana; identical to SEQ ID NO: 104318
  peptide (1)..(282): Ceres Seq. ID no. 13614761

SEQ ID NO: 115558 - protein, 271 aa, Arabidopsis thaliana; identical to SEQ ID NO: 104319
  peptide (1)..(271): Ceres Seq. ID no. 13614762

SEQ ID NO: 115559 - protein, 267 aa, Arabidopsis thaliana; identical to SEQ ID NO: 104320
  peptide (1)..(267): Ceres Seq. ID no. 13614763

SEQ ID NO: 115560 - DNA, 891 bp, Arabidopsis thaliana; identical to SEQ ID NO: 104321
  misc_feature (1)..(891): Ceres Seq. ID no. 13614767
  misc_feature (1)..(891): Ortholog of  Ceres SEQ ID NO 12619999 as cited in SEQ ID NO 66123
  misc_feature (1)..(891): Ortholog of  Ceres SEQ ID NO 13656436 as cited in SEQ ID NO 69154

SEQ ID NO: 115561 - protein, 215 aa, Arabidopsis thaliana; identical to SEQ ID NO: 104322
  peptide (1)..(215): Ceres Seq. ID no. 13614768

SEQ ID NO: 115562 - protein, 214 aa, Arabidopsis thaliana; identical to SEQ ID NO: 24892
  peptide (1)..(214): Ceres Seq. ID no. 13614769

SEQ ID NO: 115563 - protein, 161 aa, Arabidopsis thaliana; identical to SEQ ID NO: 24893
  peptide (1)..(161): Ceres Seq. ID no. 13614770

SEQ ID NO: 115564 - DNA, 1721 bp, Arabidopsis thaliana; identical to SEQ ID NO: 104325
  misc_feature (1)..(1721): Ceres Seq. ID no. 13614771
  misc_feature (1)..(1721): Ortholog of  Ceres SEQ ID NO 15170659 as cited in SEQ ID NO 67270
  misc_feature (1)..(1721): Ortholog of  Ceres SEQ ID NO 15177722 as cited in SEQ ID NO 0

SEQ ID NO: 115565 - protein, 406 aa, Arabidopsis thaliana; identical to SEQ ID NO: 104326
  peptide (1)..(406): Ceres Seq. ID no. 13614772

SEQ ID NO: 115566 - protein, 402 aa, Arabidopsis thaliana; identical to SEQ ID NO: 104327
  peptide (1)..(402): Ceres Seq. ID no. 13614773

SEQ ID NO: 115567 - protein, 354 aa, Arabidopsis thaliana; identical to SEQ ID NO: 104328
  peptide (1)..(354): Ceres Seq. ID no. 13614774

SEQ ID NO: 115568 - DNA, 1357 bp, Arabidopsis thaliana; identical to SEQ ID NO: 104329
  misc_feature (1)..(1357): Ceres Seq. ID no. 13614779
  misc_feature (1)..(1357): Ortholog of  Ceres SEQ ID NO 13598443 as cited in SEQ ID NO 69024

SEQ ID NO: 115569 - protein, 378 aa, Arabidopsis thaliana; identical to SEQ ID NO: 37655
  peptide (1)..(378): Ceres Seq. ID no. 13614780

SEQ ID NO: 115570 - protein, 377 aa, Arabidopsis thaliana; identical to SEQ ID NO: 37656
  peptide (1)..(377): Ceres Seq. ID no. 13614781

SEQ ID NO: 115571 - protein, 262 aa, Arabidopsis thaliana; identical to SEQ ID NO: 37657
  peptide (1)..(262): Ceres Seq. ID no. 13614782

SEQ ID NO: 115572 - DNA, 1302 bp, Arabidopsis thaliana; identical to SEQ ID NO: 104333
  misc_feature (1)..(1302): Ceres Seq. ID no. 13614793
  misc_feature (1)..(1302): Ortholog of  Ceres SEQ ID NO 13597033 as cited in SEQ ID NO 63479

SEQ ID NO: 115573 - protein, 359 aa, Arabidopsis thaliana; identical to SEQ ID NO: 24323
  peptide (1)..(359): Ceres Seq. ID no. 13614794

SEQ ID NO: 115574 - protein, 309 aa, Arabidopsis thaliana; identical to SEQ ID NO: 24324
  peptide (1)..(309): Ceres Seq. ID no. 13614795

SEQ ID NO: 115575 - DNA, 1351 bp, Arabidopsis thaliana; identical to SEQ ID NO: 104336
  misc_feature (1)..(1351): Ceres Seq. ID no. 13614806
  misc_feature (1)..(1351): Ortholog of  Ceres SEQ ID NO 13594037 as cited in SEQ ID NO 55666
  misc_feature (1)..(1351): Ortholog of  Ceres SEQ ID NO 13657707 as cited in SEQ ID NO 66407

SEQ ID NO: 115576 - protein, 344 aa, Arabidopsis thaliana; identical to SEQ ID NO: 29383
  peptide (1)..(344): Ceres Seq. ID no. 13614807

SEQ ID NO: 115577 - protein, 338 aa, Arabidopsis thaliana; identical to SEQ ID NO: 29384
  peptide (1)..(338): Ceres Seq. ID no. 13614808

SEQ ID NO: 115578 - protein, 329 aa, Arabidopsis thaliana; identical to SEQ ID NO: 29385
  peptide (1)..(329): Ceres Seq. ID no. 13614809

SEQ ID NO: 115579 - DNA, 1141 bp, Arabidopsis thaliana; identical to SEQ ID NO: 104340
  misc_feature (1)..(1141): Ceres Seq. ID no. 13614810
  misc_feature (1)..(1141): Ortholog of  Ceres SEQ ID NO 13594727 as cited in SEQ ID NO 52169
  misc_feature (1)..(1141): Ortholog of  Ceres SEQ ID NO 13596474 as cited in SEQ ID NO 62169
  misc_feature (1)..(1141): Ortholog of  Ceres SEQ ID NO 13598714 as cited in SEQ ID NO 62656
  misc_feature (1)..(1141): Ortholog of  Ceres SEQ ID NO 13596969 as cited in SEQ ID NO 63375
  misc_feature (1)..(1141): Ortholog of  Ceres SEQ ID NO 13597519 as cited in SEQ ID NO 64759
  misc_feature (1)..(1141): Ortholog of  Ceres SEQ ID NO 13597870 as cited in SEQ ID NO 64982
  misc_feature (1)..(1141): Ortholog of  Ceres SEQ ID NO 13595926 as cited in SEQ ID NO 67778
  misc_feature (1)..(1141): Ortholog of  Ceres SEQ ID NO 12567001 as cited in SEQ ID NO 0

SEQ ID NO: 115580 - protein, 368 aa, Arabidopsis thaliana; identical to SEQ ID NO: 104341
  peptide (1)..(368): Ceres Seq. ID no. 13614811

SEQ ID NO: 115581 - protein, 339 aa, Arabidopsis thaliana; identical to SEQ ID NO: 43049
  peptide (1)..(339): Ceres Seq. ID no. 13614812

SEQ ID NO: 115582 - protein, 321 aa, Arabidopsis thaliana; identical to SEQ ID NO: 43050
  peptide (1)..(321): Ceres Seq. ID no. 13614813

SEQ ID NO: 115583 - DNA, 1422 bp, Arabidopsis thaliana; identical to SEQ ID NO: 104344
  misc_feature (1)..(1422): Ceres Seq. ID no. 13614818
  misc_feature (1)..(1422): Ortholog of  Ceres SEQ ID NO 14314480 as cited in SEQ ID NO 52362
  misc_feature (1)..(1422): Ortholog of  Ceres SEQ ID NO 13593854 as cited in SEQ ID NO 53403
  misc_feature (1)..(1422): Ortholog of  Ceres SEQ ID NO 12581680 as cited in SEQ ID NO 55019
  misc_feature (1)..(1422): Ortholog of  Ceres SEQ ID NO 15172112 as cited in SEQ ID NO 59632

SEQ ID NO: 115584 - protein, 384 aa, Arabidopsis thaliana; identical to SEQ ID NO: 104345
  peptide (1)..(384): Ceres Seq. ID no. 13614819

SEQ ID NO: 115585 - protein, 379 aa, Arabidopsis thaliana; identical to SEQ ID NO: 104346
  peptide (1)..(379): Ceres Seq. ID no. 13614820

SEQ ID NO: 115586 - protein, 324 aa, Arabidopsis thaliana; identical to SEQ ID NO: 29304
  peptide (1)..(324): Ceres Seq. ID no. 13614821

SEQ ID NO: 115587 - DNA, 2304 bp, Arabidopsis thaliana; identical to SEQ ID NO: 104348
  misc_feature (1)..(2304): Ceres Seq. ID no. 13614833
  misc_feature (1)..(2304): Ortholog of  Ceres SEQ ID NO 14308455 as cited in SEQ ID NO 55108

SEQ ID NO: 115588 - protein, 595 aa, Arabidopsis thaliana; identical to SEQ ID NO: 104349
  peptide (1)..(595): Ceres Seq. ID no. 13614834

SEQ ID NO: 115589 - protein, 581 aa, Arabidopsis thaliana; identical to SEQ ID NO: 104350
  peptide (1)..(581): Ceres Seq. ID no. 13614835

SEQ ID NO: 115590 - protein, 493 aa, Arabidopsis thaliana; identical to SEQ ID NO: 104351
  peptide (1)..(493): Ceres Seq. ID no. 13614836

SEQ ID NO: 115591 - DNA, 1232 bp, Arabidopsis thaliana; identical to SEQ ID NO: 104352
  misc_feature (1)..(1232): Ceres Seq. ID no. 13614845
  misc_feature (1)..(1232): Ortholog of  Ceres SEQ ID NO 13654054 as cited in SEQ ID NO 67735

SEQ ID NO: 115592 - protein, 324 aa, Arabidopsis thaliana; identical to SEQ ID NO: 104353
  peptide (1)..(324): Ceres Seq. ID no. 13614846

SEQ ID NO: 115593 - protein, 277 aa, Arabidopsis thaliana; identical to SEQ ID NO: 36068
  peptide (1)..(277): Ceres Seq. ID no. 13614847

SEQ ID NO: 115594 - protein, 255 aa, Arabidopsis thaliana; identical to SEQ ID NO: 36069
  peptide (1)..(255): Ceres Seq. ID no. 13614848

SEQ ID NO: 115595 - DNA, 1376 bp, Arabidopsis thaliana; identical to SEQ ID NO: 104356
  misc_feature (1)..(1376): Ceres Seq. ID no. 13614859
  misc_feature (1)..(1376): Ortholog of  Ceres SEQ ID NO 13594740 as cited in SEQ ID NO 51721
  misc_feature (1)..(1376): Ortholog of  Ceres SEQ ID NO 14316497 as cited in SEQ ID NO 58285
  misc_feature (1)..(1376): Ortholog of  Ceres SEQ ID NO 13595944 as cited in SEQ ID NO 68153

SEQ ID NO: 115596 - protein, 338 aa, Arabidopsis thaliana; identical to SEQ ID NO: 40283
  peptide (1)..(338): Ceres Seq. ID no. 13614860

SEQ ID NO: 115597 - protein, 330 aa, Arabidopsis thaliana; identical to SEQ ID NO: 40284
  peptide (1)..(330): Ceres Seq. ID no. 13614861

SEQ ID NO: 115598 - protein, 270 aa, Arabidopsis thaliana; identical to SEQ ID NO: 40285
  peptide (1)..(270): Ceres Seq. ID no. 13614862

SEQ ID NO: 115599 - DNA, 1550 bp, Arabidopsis thaliana; identical to SEQ ID NO: 104360
  misc_feature (1)..(1550): Ceres Seq. ID no. 13614863
  misc_feature (1)..(1550): Ortholog of  Ceres SEQ ID NO 15171275 as cited in SEQ ID NO 51428
  misc_feature (1)..(1550): Ortholog of  Ceres SEQ ID NO 14307678 as cited in SEQ ID NO 59456
  misc_feature (1)..(1550): Ortholog of  Ceres SEQ ID NO 13586716 as cited in SEQ ID NO 0

SEQ ID NO: 115600 - protein, 427 aa, Arabidopsis thaliana; identical to SEQ ID NO: 104361
  peptide (1)..(427): Ceres Seq. ID no. 13614864

SEQ ID NO: 115601 - protein, 402 aa, Arabidopsis thaliana; identical to SEQ ID NO: 104362
  peptide (1)..(402): Ceres Seq. ID no. 13614865

SEQ ID NO: 115602 - protein, 243 aa, Arabidopsis thaliana; identical to SEQ ID NO: 39464
  peptide (1)..(243): Ceres Seq. ID no. 13614866

SEQ ID NO: 115603 - DNA, 1310 bp, Arabidopsis thaliana; identical to SEQ ID NO: 104364
  misc_feature (1)..(1310): Ceres Seq. ID no. 13614867
  misc_feature (1)..(1310): Ortholog of  Ceres SEQ ID NO 14310524 as cited in SEQ ID NO 58840
  misc_feature (1)..(1310): Ortholog of  Ceres SEQ ID NO 15169541 as cited in SEQ ID NO 67500

SEQ ID NO: 115604 - protein, 354 aa, Arabidopsis thaliana; identical to SEQ ID NO: 104365
  peptide (1)..(354): Ceres Seq. ID no. 13614868

SEQ ID NO: 115605 - protein, 324 aa, Arabidopsis thaliana; identical to SEQ ID NO: 104366
  peptide (1)..(324): Ceres Seq. ID no. 13614869

SEQ ID NO: 115606 - protein, 264 aa, Arabidopsis thaliana; identical to SEQ ID NO: 104367
  peptide (1)..(264): Ceres Seq. ID no. 13614870

SEQ ID NO: 115607 - DNA, 921 bp, Arabidopsis thaliana; identical to SEQ ID NO: 104368
  misc_feature (1)..(921): Ceres Seq. ID no. 13614879
  misc_feature (1)..(921): Ortholog of  Ceres SEQ ID NO 14302082 as cited in SEQ ID NO 64529

SEQ ID NO: 115608 - protein, 265 aa, Arabidopsis thaliana; identical to SEQ ID NO: 38015
  peptide (1)..(265): Ceres Seq. ID no. 13614880

SEQ ID NO: 115609 - protein, 182 aa, Arabidopsis thaliana; identical to SEQ ID NO: 38016
  peptide (1)..(182): Ceres Seq. ID no. 13614881

SEQ ID NO: 115610 - DNA, 1445 bp, Arabidopsis thaliana; identical to SEQ ID NO: 104371
  misc_feature (1)..(1445): Ceres Seq. ID no. 13614890
  misc_feature (1)..(1445): Ortholog of  Ceres SEQ ID NO 15171275 as cited in SEQ ID NO 51428

SEQ ID NO: 115611 - protein, 368 aa, Arabidopsis thaliana; identical to SEQ ID NO: 23835
  peptide (1)..(368): Ceres Seq. ID no. 13614891

SEQ ID NO: 115612 - protein, 327 aa, Arabidopsis thaliana; identical to SEQ ID NO: 23836
  peptide (1)..(327): Ceres Seq. ID no. 13614892

SEQ ID NO: 115613 - protein, 263 aa, Arabidopsis thaliana; identical to SEQ ID NO: 23837
  peptide (1)..(263): Ceres Seq. ID no. 13614893

SEQ ID NO: 115614 - DNA, 1712 bp, Arabidopsis thaliana; identical to SEQ ID NO: 104375
  misc_feature (1)..(1712): Ceres Seq. ID no. 13614894
  misc_feature (1)..(1712): Ortholog of  Ceres SEQ ID NO 13596816 as cited in SEQ ID NO 62287

SEQ ID NO: 115615 - protein, 493 aa, Arabidopsis thaliana; identical to SEQ ID NO: 104376
  peptide (1)..(493): Ceres Seq. ID no. 13614895

SEQ ID NO: 115616 - protein, 460 aa, Arabidopsis thaliana; identical to SEQ ID NO: 23286
  peptide (1)..(460): Ceres Seq. ID no. 13614896

SEQ ID NO: 115617 - protein, 384 aa, Arabidopsis thaliana; identical to SEQ ID NO: 23287
  peptide (1)..(384): Ceres Seq. ID no. 13614897

SEQ ID NO: 115618 - DNA, 1127 bp, Arabidopsis thaliana; identical to SEQ ID NO: 104379
  misc_feature (1)..(1127): Ceres Seq. ID no. 13614898
  misc_feature (1)..(1127): Ortholog of  Ceres SEQ ID NO 14303047 as cited in SEQ ID NO 66871

SEQ ID NO: 115619 - protein, 348 aa, Arabidopsis thaliana; identical to SEQ ID NO: 36536
  peptide (1)..(348): Ceres Seq. ID no. 13614899

SEQ ID NO: 115620 - protein, 298 aa, Arabidopsis thaliana; identical to SEQ ID NO: 36537
  peptide (1)..(298): Ceres Seq. ID no. 13614900

SEQ ID NO: 115621 - protein, 180 aa, Arabidopsis thaliana; identical to SEQ ID NO: 36538
  peptide (1)..(180): Ceres Seq. ID no. 13614901

SEQ ID NO: 115622 - DNA, 709 bp, Arabidopsis thaliana; identical to SEQ ID NO: 104383
  misc_feature (1)..(709): Ceres Seq. ID no. 13614906
  misc_feature (1)..(709): Ortholog of  Ceres SEQ ID NO 14304090 as cited in SEQ ID NO 53446
  misc_feature (1)..(709): Ortholog of  Ceres SEQ ID NO 14311355 as cited in SEQ ID NO 54082

SEQ ID NO: 115623 - protein, 225 aa, Arabidopsis thaliana; identical to SEQ ID NO: 104384
  peptide (1)..(225): Ceres Seq. ID no. 13614907

SEQ ID NO: 115624 - protein, 205 aa, Arabidopsis thaliana; identical to SEQ ID NO: 104385
  peptide (1)..(205): Ceres Seq. ID no. 13614908

SEQ ID NO: 115625 - protein, 204 aa, Arabidopsis thaliana; identical to SEQ ID NO: 104386
  peptide (1)..(204): Ceres Seq. ID no. 13614909

SEQ ID NO: 115626 - DNA, 1500 bp, Arabidopsis thaliana; identical to SEQ ID NO: 104387
  misc_feature (1)..(1500): Ceres Seq. ID no. 13614918
  misc_feature (1)..(1500): Ortholog of  Ceres SEQ ID NO 13502943 as cited in SEQ ID NO 65097

SEQ ID NO: 115627 - protein, 385 aa, Arabidopsis thaliana; identical to SEQ ID NO: 41164
  peptide (1)..(385): Ceres Seq. ID no. 13614919

SEQ ID NO: 115628 - protein, 381 aa, Arabidopsis thaliana; identical to SEQ ID NO: 41165
  peptide (1)..(381): Ceres Seq. ID no. 13614920

SEQ ID NO: 115629 - protein, 379 aa, Arabidopsis thaliana; identical to SEQ ID NO: 41166
  peptide (1)..(379): Ceres Seq. ID no. 13614921

SEQ ID NO: 115630 - DNA, 2427 bp, Arabidopsis thaliana; identical to SEQ ID NO: 104391
  misc_feature (1)..(2427): Ceres Seq. ID no. 13614928
  misc_feature (1)..(2427): Ortholog of  Ceres SEQ ID NO 13598023 as cited in SEQ ID NO 66487

SEQ ID NO: 115631 - protein, 695 aa, Arabidopsis thaliana; identical to SEQ ID NO: 77178
  peptide (1)..(695): Ceres Seq. ID no. 13614929

SEQ ID NO: 115632 - protein, 644 aa, Arabidopsis thaliana; identical to SEQ ID NO: 38197
  peptide (1)..(644): Ceres Seq. ID no. 13614930

SEQ ID NO: 115633 - protein, 626 aa, Arabidopsis thaliana; identical to SEQ ID NO: 38198
  peptide (1)..(626): Ceres Seq. ID no. 13614931

SEQ ID NO: 115634 - DNA, 2604 bp, Arabidopsis thaliana; identical to SEQ ID NO: 104395
  misc_feature (1)..(2604): Ceres Seq. ID no. 13614932
  misc_feature (1)..(2604): Ortholog of  Ceres SEQ ID NO 12364737 as cited in SEQ ID NO 51089
  misc_feature (1)..(2604): Ortholog of  Ceres SEQ ID NO 14316263 as cited in SEQ ID NO 55294
  misc_feature (1)..(2604): Ortholog of  Ceres SEQ ID NO 15176751 as cited in SEQ ID NO 59719
  misc_feature (1)..(2604): Ortholog of  Ceres SEQ ID NO 13597380 as cited in SEQ ID NO 64054
  misc_feature (1)..(2604): Ortholog of  Ceres SEQ ID NO 12625474 as cited in SEQ ID NO 64169
  misc_feature (1)..(2604): Ortholog of  Ceres SEQ ID NO 13597502 as cited in SEQ ID NO 64681
  misc_feature (1)..(2604): Ortholog of  Ceres SEQ ID NO 13597532 as cited in SEQ ID NO 64873

SEQ ID NO: 115635 - protein, 822 aa, Arabidopsis thaliana; identical to SEQ ID NO: 104396
  peptide (1)..(822): Ceres Seq. ID no. 13614933

SEQ ID NO: 115636 - protein, 813 aa, Arabidopsis thaliana; identical to SEQ ID NO: 104397
  peptide (1)..(813): Ceres Seq. ID no. 13614934

SEQ ID NO: 115637 - protein, 811 aa, Arabidopsis thaliana; identical to SEQ ID NO: 104398
  peptide (1)..(811): Ceres Seq. ID no. 13614935

SEQ ID NO: 115638 - DNA, 1668 bp, Arabidopsis thaliana; identical to SEQ ID NO: 104399
  misc_feature (1)..(1668): Ceres Seq. ID no. 13614936
  misc_feature (1)..(1668): Ortholog of  Ceres SEQ ID NO 14311862 as cited in SEQ ID NO 51654
  misc_feature (1)..(1668): Ortholog of  Ceres SEQ ID NO 13597334 as cited in SEQ ID NO 64244
  misc_feature (1)..(1668): Ortholog of  Ceres SEQ ID NO 14303165 as cited in SEQ ID NO 65181
  misc_feature (1)..(1668): Ortholog of  Ceres SEQ ID NO 15224550 as cited in SEQ ID NO 0

SEQ ID NO: 115639 - protein, 430 aa, Arabidopsis thaliana; identical to SEQ ID NO: 41204
  peptide (1)..(430): Ceres Seq. ID no. 13614937

SEQ ID NO: 115640 - protein, 330 aa, Arabidopsis thaliana; identical to SEQ ID NO: 41205
  peptide (1)..(330): Ceres Seq. ID no. 13614938

SEQ ID NO: 115641 - protein, 327 aa, Arabidopsis thaliana; identical to SEQ ID NO: 41206
  peptide (1)..(327): Ceres Seq. ID no. 13614939

SEQ ID NO: 115642 - DNA, 2004 bp, Arabidopsis thaliana; identical to SEQ ID NO: 104403
  misc_feature (1)..(2004): Ceres Seq. ID no. 13614943
  misc_feature (1)..(2004): Ortholog of  Ceres SEQ ID NO 14309934 as cited in SEQ ID NO 20583
  misc_feature (1)..(2004): Ortholog of  Ceres SEQ ID NO 13654989 as cited in SEQ ID NO 63117
  misc_feature (1)..(2004): Ortholog of  Ceres SEQ ID NO 13584744 as cited in SEQ ID NO 69137

SEQ ID NO: 115643 - protein, 484 aa, Arabidopsis thaliana; identical to SEQ ID NO: 29831
  peptide (1)..(484): Ceres Seq. ID no. 13614944

SEQ ID NO: 115644 - protein, 324 aa, Arabidopsis thaliana; identical to SEQ ID NO: 29832
  peptide (1)..(324): Ceres Seq. ID no. 13614945

SEQ ID NO: 115645 - protein, 255 aa, Arabidopsis thaliana; identical to SEQ ID NO: 29833
  peptide (1)..(255): Ceres Seq. ID no. 13614946

SEQ ID NO: 115646 - DNA, 1562 bp, Arabidopsis thaliana; identical to SEQ ID NO: 104407
  misc_feature (1)..(1562): Ceres Seq. ID no. 13614947
  misc_feature (1)..(1562): Ortholog of  Ceres SEQ ID NO 14311989 as cited in SEQ ID NO 54997

SEQ ID NO: 115647 - protein, 259 aa, Arabidopsis thaliana; identical to SEQ ID NO: 104408
  peptide (1)..(259): Ceres Seq. ID no. 13614948

SEQ ID NO: 115648 - protein, 227 aa, Arabidopsis thaliana; identical to SEQ ID NO: 104409
  peptide (1)..(227): Ceres Seq. ID no. 13614949

SEQ ID NO: 115649 - protein, 223 aa, Arabidopsis thaliana; identical to SEQ ID NO: 104410
  peptide (1)..(223): Ceres Seq. ID no. 13614950

SEQ ID NO: 115650 - DNA, 1439 bp, Arabidopsis thaliana; identical to SEQ ID NO: 104411
  misc_feature (1)..(1439): Ceres Seq. ID no. 13614951
  misc_feature (1)..(1439): Ortholog of  Ceres SEQ ID NO 15175775 as cited in SEQ ID NO 57075

SEQ ID NO: 115651 - protein, 451 aa, Arabidopsis thaliana; identical to SEQ ID NO: 104412
  peptide (1)..(451): Ceres Seq. ID no. 13614952

SEQ ID NO: 115652 - protein, 417 aa, Arabidopsis thaliana; identical to SEQ ID NO: 104413
  peptide (1)..(417): Ceres Seq. ID no. 13614953

SEQ ID NO: 115653 - protein, 315 aa, Arabidopsis thaliana; identical to SEQ ID NO: 104414
  peptide (1)..(315): Ceres Seq. ID no. 13614954

SEQ ID NO: 115654 - DNA, 1294 bp, Arabidopsis thaliana; identical to SEQ ID NO: 104415
  misc_feature (1)..(1294): Ceres Seq. ID no. 13614955
  misc_feature (1)..(1294): Ortholog of  Ceres SEQ ID NO 15175690 as cited in SEQ ID NO 55466
  misc_feature (1)..(1294): Ortholog of  Ceres SEQ ID NO 14306381 as cited in SEQ ID NO 58812

SEQ ID NO: 115655 - protein, 403 aa, Arabidopsis thaliana; identical to SEQ ID NO: 104416
  peptide (1)..(403): Ceres Seq. ID no. 13614956

SEQ ID NO: 115656 - protein, 389 aa, Arabidopsis thaliana; identical to SEQ ID NO: 104417
  peptide (1)..(389): Ceres Seq. ID no. 13614957

SEQ ID NO: 115657 - protein, 380 aa, Arabidopsis thaliana; identical to SEQ ID NO: 104418
  peptide (1)..(380): Ceres Seq. ID no. 13614958

SEQ ID NO: 115658 - DNA, 1498 bp, Arabidopsis thaliana; identical to SEQ ID NO: 104419
  misc_feature (1)..(1498): Ceres Seq. ID no. 13614959
  misc_feature (1)..(1498): Ortholog of  Ceres SEQ ID NO 14314536 as cited in SEQ ID NO 52436

SEQ ID NO: 115659 - protein, 428 aa, Arabidopsis thaliana; identical to SEQ ID NO: 104420
  peptide (1)..(428): Ceres Seq. ID no. 13614960

SEQ ID NO: 115660 - protein, 411 aa, Arabidopsis thaliana; identical to SEQ ID NO: 104421
  peptide (1)..(411): Ceres Seq. ID no. 13614961

SEQ ID NO: 115661 - protein, 410 aa, Arabidopsis thaliana; identical to SEQ ID NO: 104422
  peptide (1)..(410): Ceres Seq. ID no. 13614962

SEQ ID NO: 115662 - DNA, 710 bp, Arabidopsis thaliana; identical to SEQ ID NO: 104423
  misc_feature (1)..(710): Ceres Seq. ID no. 13614963
  misc_feature (1)..(710): Ortholog of  Ceres SEQ ID NO 12422485 as cited in SEQ ID NO 20557

SEQ ID NO: 115663 - protein, 155 aa, Arabidopsis thaliana; identical to SEQ ID NO: 104424
  peptide (1)..(155): Ceres Seq. ID no. 13614964

SEQ ID NO: 115664 - protein, 106 aa, Arabidopsis thaliana; identical to SEQ ID NO: 28463
  peptide (1)..(106): Ceres Seq. ID no. 13614965

SEQ ID NO: 115665 - protein, 80 aa, Arabidopsis thaliana; identical to SEQ ID NO: 28464
  peptide (1)..(80): Ceres Seq. ID no. 13614966

SEQ ID NO: 115666 - DNA, 1747 bp, Arabidopsis thaliana; identical to SEQ ID NO: 104427
  misc_feature (1)..(1747): Ceres Seq. ID no. 13614967
  misc_feature (1)..(1747): Ortholog of  Ceres SEQ ID NO 13597407 as cited in SEQ ID NO 64106

SEQ ID NO: 115667 - protein, 482 aa, Arabidopsis thaliana; identical to SEQ ID NO: 26636
  peptide (1)..(482): Ceres Seq. ID no. 13614968

SEQ ID NO: 115668 - protein, 440 aa, Arabidopsis thaliana; identical to SEQ ID NO: 26637
  peptide (1)..(440): Ceres Seq. ID no. 13614969

SEQ ID NO: 115669 - protein, 398 aa, Arabidopsis thaliana; identical to SEQ ID NO: 26638
  peptide (1)..(398): Ceres Seq. ID no. 13614970

SEQ ID NO: 115670 - DNA, 2265 bp, Arabidopsis thaliana; identical to SEQ ID NO: 104431
  misc_feature (1)..(2265): Ceres Seq. ID no. 13614971
  misc_feature (1)..(2265): Ortholog of  Ceres SEQ ID NO 14310784 as cited in SEQ ID NO 58503

SEQ ID NO: 115671 - protein, 686 aa, Arabidopsis thaliana; identical to SEQ ID NO: 104432
  peptide (1)..(686): Ceres Seq. ID no. 13614972

SEQ ID NO: 115672 - protein, 612 aa, Arabidopsis thaliana; identical to SEQ ID NO: 40965
  peptide (1)..(612): Ceres Seq. ID no. 13614973

SEQ ID NO: 115673 - protein, 502 aa, Arabidopsis thaliana; identical to SEQ ID NO: 40966
  peptide (1)..(502): Ceres Seq. ID no. 13614974

SEQ ID NO: 115674 - DNA, 1326 bp, Arabidopsis thaliana; identical to SEQ ID NO: 104435
  misc_feature (1)..(1326): Ceres Seq. ID no. 13614975
  misc_feature (1)..(1326): Ortholog of  Ceres SEQ ID NO 13662984 as cited in SEQ ID NO 64419

SEQ ID NO: 115675 - protein, 306 aa, Arabidopsis thaliana; identical to SEQ ID NO: 104436
  peptide (1)..(306): Ceres Seq. ID no. 13614976

SEQ ID NO: 115676 - protein, 259 aa, Arabidopsis thaliana; identical to SEQ ID NO: 104437
  peptide (1)..(259): Ceres Seq. ID no. 13614977

SEQ ID NO: 115677 - protein, 153 aa, Arabidopsis thaliana; identical to SEQ ID NO: 104438
  peptide (1)..(153): Ceres Seq. ID no. 13614978

SEQ ID NO: 115678 - DNA, 1162 bp, Arabidopsis thaliana; identical to SEQ ID NO: 104439
  misc_feature (1)..(1162): Ceres Seq. ID no. 13614979
  misc_feature (1)..(1162): Ortholog of  Ceres SEQ ID NO 14314331 as cited in SEQ ID NO 57390

SEQ ID NO: 115679 - protein, 333 aa, Arabidopsis thaliana; identical to SEQ ID NO: 104440
  peptide (1)..(333): Ceres Seq. ID no. 13614980

SEQ ID NO: 115680 - protein, 330 aa, Arabidopsis thaliana; identical to SEQ ID NO: 104441
  peptide (1)..(330): Ceres Seq. ID no. 13614981

SEQ ID NO: 115681 - protein, 317 aa, Arabidopsis thaliana; identical to SEQ ID NO: 104442
  peptide (1)..(317): Ceres Seq. ID no. 13614982

SEQ ID NO: 115682 - DNA, 1838 bp, Arabidopsis thaliana; identical to SEQ ID NO: 104443
  misc_feature (1)..(1838): Ceres Seq. ID no. 13614987
  misc_feature (1)..(1838): Ortholog of  Ceres SEQ ID NO 15173355 as cited in SEQ ID NO 61844

SEQ ID NO: 115683 - protein, 377 aa, Arabidopsis thaliana; identical to SEQ ID NO: 104444
  peptide (1)..(377): Ceres Seq. ID no. 13614988

SEQ ID NO: 115684 - protein, 355 aa, Arabidopsis thaliana; identical to SEQ ID NO: 104445
  peptide (1)..(355): Ceres Seq. ID no. 13614989

SEQ ID NO: 115685 - protein, 245 aa, Arabidopsis thaliana; identical to SEQ ID NO: 31081
  peptide (1)..(245): Ceres Seq. ID no. 13614990

SEQ ID NO: 115686 - DNA, 1162 bp, Arabidopsis thaliana; identical to SEQ ID NO: 104447
  misc_feature (1)..(1162): Ceres Seq. ID no. 13614995
  misc_feature (1)..(1162): Ortholog of  Ceres SEQ ID NO 15178884 as cited in SEQ ID NO 0

SEQ ID NO: 115687 - protein, 275 aa, Arabidopsis thaliana; identical to SEQ ID NO: 40593
  peptide (1)..(275): Ceres Seq. ID no. 13614996

SEQ ID NO: 115688 - DNA, 1260 bp, Arabidopsis thaliana; identical to SEQ ID NO: 104449
  misc_feature (1)..(1260): Ceres Seq. ID no. 13614997
  misc_feature (1)..(1260): Ortholog of  Ceres SEQ ID NO 13597325 as cited in SEQ ID NO 63935

SEQ ID NO: 115689 - protein, 385 aa, Arabidopsis thaliana; identical to SEQ ID NO: 104450
  peptide (1)..(385): Ceres Seq. ID no. 13614998

SEQ ID NO: 115690 - protein, 355 aa, Arabidopsis thaliana; identical to SEQ ID NO: 39386
  peptide (1)..(355): Ceres Seq. ID no. 13614999

SEQ ID NO: 115691 - protein, 345 aa, Arabidopsis thaliana; identical to SEQ ID NO: 39387
  peptide (1)..(345): Ceres Seq. ID no. 13615000

SEQ ID NO: 115692 - DNA, 1630 bp, Arabidopsis thaliana; identical to SEQ ID NO: 104453
  misc_feature (1)..(1630): Ceres Seq. ID no. 13615001
  misc_feature (1)..(1630): Ortholog of  Ceres SEQ ID NO 14310419 as cited in SEQ ID NO 55050
  misc_feature (1)..(1630): Ortholog of  Ceres SEQ ID NO 13657789 as cited in SEQ ID NO 66154

SEQ ID NO: 115693 - protein, 434 aa, Arabidopsis thaliana; identical to SEQ ID NO: 35755
  peptide (1)..(434): Ceres Seq. ID no. 13615002

SEQ ID NO: 115694 - protein, 426 aa, Arabidopsis thaliana; identical to SEQ ID NO: 35756
  peptide (1)..(426): Ceres Seq. ID no. 13615003

SEQ ID NO: 115695 - protein, 334 aa, Arabidopsis thaliana; identical to SEQ ID NO: 35757
  peptide (1)..(334): Ceres Seq. ID no. 13615004

SEQ ID NO: 115696 - DNA, 1235 bp, Arabidopsis thaliana; identical to SEQ ID NO: 104457
  misc_feature (1)..(1235): Ceres Seq. ID no. 13615005
  misc_feature (1)..(1235): Ortholog of  Ceres SEQ ID NO 12609869 as cited in SEQ ID NO 52065
  misc_feature (1)..(1235): Ortholog of  Ceres SEQ ID NO 14301506 as cited in SEQ ID NO 61159
  misc_feature (1)..(1235): Ortholog of  Ceres SEQ ID NO 13597124 as cited in SEQ ID NO 64173
  misc_feature (1)..(1235): Ortholog of  Ceres SEQ ID NO 12780602 as cited in SEQ ID NO 65695

SEQ ID NO: 115697 - protein, 298 aa, Arabidopsis thaliana; identical to SEQ ID NO: 104458
  peptide (1)..(298): Ceres Seq. ID no. 13615006

SEQ ID NO: 115698 - protein, 274 aa, Arabidopsis thaliana; identical to SEQ ID NO: 26016
  peptide (1)..(274): Ceres Seq. ID no. 13615007

SEQ ID NO: 115699 - DNA, 1600 bp, Arabidopsis thaliana; identical to SEQ ID NO: 104460
  misc_feature (1)..(1600): Ceres Seq. ID no. 13615008
  misc_feature (1)..(1600): Ortholog of  Ceres SEQ ID NO 15176317 as cited in SEQ ID NO 52865
  misc_feature (1)..(1600): Ortholog of  Ceres SEQ ID NO 13518893 as cited in SEQ ID NO 58108
  misc_feature (1)..(1600): Ortholog of  Ceres SEQ ID NO 12617152 as cited in SEQ ID NO 63555

SEQ ID NO: 115700 - protein, 490 aa, Arabidopsis thaliana; identical to SEQ ID NO: 27108
  peptide (1)..(490): Ceres Seq. ID no. 13615009

SEQ ID NO: 115701 - protein, 298 aa, Arabidopsis thaliana; identical to SEQ ID NO: 27109
  peptide (1)..(298): Ceres Seq. ID no. 13615010

SEQ ID NO: 115702 - DNA, 1344 bp, Arabidopsis thaliana; identical to SEQ ID NO: 104463
  misc_feature (1)..(1344): Ceres Seq. ID no. 13615019
  misc_feature (1)..(1344): Ortholog of  Ceres SEQ ID NO 13594301 as cited in SEQ ID NO 60110

SEQ ID NO: 115703 - protein, 293 aa, Arabidopsis thaliana; identical to SEQ ID NO: 40686
  peptide (1)..(293): Ceres Seq. ID no. 13615020

SEQ ID NO: 115704 - protein, 223 aa, Arabidopsis thaliana; identical to SEQ ID NO: 40687
  peptide (1)..(223): Ceres Seq. ID no. 13615021

SEQ ID NO: 115705 - protein, 222 aa, Arabidopsis thaliana; identical to SEQ ID NO: 40688
  peptide (1)..(222): Ceres Seq. ID no. 13615022

SEQ ID NO: 115706 - DNA, 1557 bp, Arabidopsis thaliana; identical to SEQ ID NO: 104467
  misc_feature (1)..(1557): Ceres Seq. ID no. 13615026
  misc_feature (1)..(1557): Ortholog of  Ceres SEQ ID NO 15176437 as cited in SEQ ID NO 54861
  misc_feature (1)..(1557): Ortholog of  Ceres SEQ ID NO 15176748 as cited in SEQ ID NO 55581

SEQ ID NO: 115707 - protein, 385 aa, Arabidopsis thaliana; identical to SEQ ID NO: 28899
  peptide (1)..(385): Ceres Seq. ID no. 13615027

SEQ ID NO: 115708 - protein, 288 aa, Arabidopsis thaliana; identical to SEQ ID NO: 28900
  peptide (1)..(288): Ceres Seq. ID no. 13615028

SEQ ID NO: 115709 - protein, 241 aa, Arabidopsis thaliana; identical to SEQ ID NO: 28901
  peptide (1)..(241): Ceres Seq. ID no. 13615029

SEQ ID NO: 115710 - DNA, 623 bp, Arabidopsis thaliana; identical to SEQ ID NO: 104471
  misc_feature (1)..(623): Ceres Seq. ID no. 13615030
  misc_feature (1)..(623): Ortholog of  Ceres SEQ ID NO 14309653 as cited in SEQ ID NO 0

SEQ ID NO: 115711 - protein, 128 aa, Arabidopsis thaliana; identical to SEQ ID NO: 26405
  peptide (1)..(128): Ceres Seq. ID no. 13615031

SEQ ID NO: 115712 - protein, 106 aa, Arabidopsis thaliana; identical to SEQ ID NO: 26406
  peptide (1)..(106): Ceres Seq. ID no. 13615032

SEQ ID NO: 115713 - protein, 73 aa, Arabidopsis thaliana; identical to SEQ ID NO: 21543
  peptide (1)..(73): Ceres Seq. ID no. 13615033

SEQ ID NO: 115714 - DNA, 772 bp, Arabidopsis thaliana; identical to SEQ ID NO: 104475
  misc_feature (1)..(772): Ceres Seq. ID no. 13615036
  misc_feature (1)..(772): Ortholog of  Ceres SEQ ID NO 15179490 as cited in SEQ ID NO 0

SEQ ID NO: 115715 - protein, 218 aa, Arabidopsis thaliana; identical to SEQ ID NO: 104476
  peptide (1)..(218): Ceres Seq. ID no. 13615037

SEQ ID NO: 115716 - protein, 213 aa, Arabidopsis thaliana; identical to SEQ ID NO: 23670
  peptide (1)..(213): Ceres Seq. ID no. 13615038

SEQ ID NO: 115717 - protein, 115 aa, Arabidopsis thaliana; identical to SEQ ID NO: 23671
  peptide (1)..(115): Ceres Seq. ID no. 13615039

SEQ ID NO: 115718 - DNA, 847 bp, Arabidopsis thaliana; identical to SEQ ID NO: 104479
  misc_feature (1)..(847): Ceres Seq. ID no. 13615040
  misc_feature (1)..(847): Ortholog of  Ceres SEQ ID NO 14316367 as cited in SEQ ID NO 57626
  misc_feature (1)..(847): Ortholog of  Ceres SEQ ID NO 14315039 as cited in SEQ ID NO 57668
  misc_feature (1)..(847): Ortholog of  Ceres SEQ ID NO 13664189 as cited in SEQ ID NO 66834
  misc_feature (1)..(847): Ortholog of  Ceres SEQ ID NO 13654321 as cited in SEQ ID NO 67850

SEQ ID NO: 115719 - protein, 183 aa, Arabidopsis thaliana; identical to SEQ ID NO: 28570
  peptide (1)..(183): Ceres Seq. ID no. 13615041

SEQ ID NO: 115720 - protein, 153 aa, Arabidopsis thaliana; identical to SEQ ID NO: 28571
  peptide (1)..(153): Ceres Seq. ID no. 13615042

SEQ ID NO: 115721 - DNA, 1154 bp, Arabidopsis thaliana; identical to SEQ ID NO: 104482
  misc_feature (1)..(1154): Ceres Seq. ID no. 13615043
  misc_feature (1)..(1154): Ortholog of  Ceres SEQ ID NO 13584238 as cited in SEQ ID NO 64216

SEQ ID NO: 115722 - protein, 266 aa, Arabidopsis thaliana; identical to SEQ ID NO: 43012
  peptide (1)..(266): Ceres Seq. ID no. 13615044

SEQ ID NO: 115723 - protein, 148 aa, Arabidopsis thaliana; identical to SEQ ID NO: 43013
  peptide (1)..(148): Ceres Seq. ID no. 13615045

SEQ ID NO: 115724 - protein, 143 aa, Arabidopsis thaliana; identical to SEQ ID NO: 43014
  peptide (1)..(143): Ceres Seq. ID no. 13615046

SEQ ID NO: 115725 - DNA, 784 bp, Arabidopsis thaliana; identical to SEQ ID NO: 104486
  misc_feature (1)..(784): Ceres Seq. ID no. 13615055
  misc_feature (1)..(784): Ortholog of  Ceres SEQ ID NO 12610286 as cited in SEQ ID NO 55827

SEQ ID NO: 115726 - protein, 209 aa, Arabidopsis thaliana; identical to SEQ ID NO: 44682
  peptide (1)..(209): Ceres Seq. ID no. 13615056

SEQ ID NO: 115727 - protein, 193 aa, Arabidopsis thaliana; identical to SEQ ID NO: 44683
  peptide (1)..(193): Ceres Seq. ID no. 13615057

SEQ ID NO: 115728 - DNA, 1661 bp, Arabidopsis thaliana; identical to SEQ ID NO: 104489
  misc_feature (1)..(1661): Ceres Seq. ID no. 13615102
  misc_feature (1)..(1661): Ortholog of  Ceres SEQ ID NO 13596816 as cited in SEQ ID NO 62287

SEQ ID NO: 115729 - protein, 388 aa, Arabidopsis thaliana; identical to SEQ ID NO: 104490
  peptide (1)..(388): Ceres Seq. ID no. 13615103

SEQ ID NO: 115730 - protein, 294 aa, Arabidopsis thaliana; identical to SEQ ID NO: 104491
  peptide (1)..(294): Ceres Seq. ID no. 13615104

SEQ ID NO: 115731 - protein, 235 aa, Arabidopsis thaliana; identical to SEQ ID NO: 104492
  peptide (1)..(235): Ceres Seq. ID no. 13615105

SEQ ID NO: 115732 - DNA, 1220 bp, Arabidopsis thaliana; identical to SEQ ID NO: 104493
  misc_feature (1)..(1220): Ceres Seq. ID no. 13615106
  misc_feature (1)..(1220): Ortholog of  Ceres SEQ ID NO 15225993 as cited in SEQ ID NO 61065

SEQ ID NO: 115733 - protein, 319 aa, Arabidopsis thaliana; identical to SEQ ID NO: 104494
  peptide (1)..(319): Ceres Seq. ID no. 13615107

SEQ ID NO: 115734 - protein, 194 aa, Arabidopsis thaliana; identical to SEQ ID NO: 104495
  peptide (1)..(194): Ceres Seq. ID no. 13615108

SEQ ID NO: 115735 - protein, 176 aa, Arabidopsis thaliana; identical to SEQ ID NO: 104496
  peptide (1)..(176): Ceres Seq. ID no. 13615109

SEQ ID NO: 115736 - DNA, 1020 bp, Arabidopsis thaliana; identical to SEQ ID NO: 104497
  misc_feature (1)..(1020): Ceres Seq. ID no. 13615117
  misc_feature (1)..(1020): Ortholog of  Ceres SEQ ID NO 13597272 as cited in SEQ ID NO 63951

SEQ ID NO: 115737 - protein, 288 aa, Arabidopsis thaliana; identical to SEQ ID NO: 104498
  peptide (1)..(288): Ceres Seq. ID no. 13615118

SEQ ID NO: 115738 - protein, 249 aa, Arabidopsis thaliana; identical to SEQ ID NO: 28051
  peptide (1)..(249): Ceres Seq. ID no. 13615119

SEQ ID NO: 115739 - protein, 202 aa, Arabidopsis thaliana; identical to SEQ ID NO: 28052
  peptide (1)..(202): Ceres Seq. ID no. 13615120

SEQ ID NO: 115740 - DNA, 1599 bp, Arabidopsis thaliana; identical to SEQ ID NO: 104501
  misc_feature (1)..(1599): Ceres Seq. ID no. 13615137
  misc_feature (1)..(1599): Ortholog of  Ceres SEQ ID NO 15176433 as cited in SEQ ID NO 59539

SEQ ID NO: 115741 - protein, 474 aa, Arabidopsis thaliana; identical to SEQ ID NO: 104502
  peptide (1)..(474): Ceres Seq. ID no. 13615138

SEQ ID NO: 115742 - protein, 469 aa, Arabidopsis thaliana; identical to SEQ ID NO: 104503
  peptide (1)..(469): Ceres Seq. ID no. 13615139

SEQ ID NO: 115743 - protein, 426 aa, Arabidopsis thaliana; identical to SEQ ID NO: 104504
  peptide (1)..(426): Ceres Seq. ID no. 13615140

SEQ ID NO: 115744 - DNA, 1061 bp, Arabidopsis thaliana; identical to SEQ ID NO: 104505
  misc_feature (1)..(1061): Ceres Seq. ID no. 13615159
  misc_feature (1)..(1061): Ortholog of  Ceres SEQ ID NO 12609419 as cited in SEQ ID NO 52077

SEQ ID NO: 115745 - protein, 232 aa, Arabidopsis thaliana; identical to SEQ ID NO: 104506
  peptide (1)..(232): Ceres Seq. ID no. 13615160

SEQ ID NO: 115746 - protein, 146 aa, Arabidopsis thaliana; identical to SEQ ID NO: 104507
  peptide (1)..(146): Ceres Seq. ID no. 13615161

SEQ ID NO: 115747 - DNA, 1324 bp, Arabidopsis thaliana; identical to SEQ ID NO: 104508
  misc_feature (1)..(1324): Ceres Seq. ID no. 13615162
  misc_feature (1)..(1324): Ortholog of  Ceres SEQ ID NO 14306769 as cited in SEQ ID NO 52984

SEQ ID NO: 115748 - protein, 372 aa, Arabidopsis thaliana; identical to SEQ ID NO: 40072
  peptide (1)..(372): Ceres Seq. ID no. 13615163

SEQ ID NO: 115749 - protein, 288 aa, Arabidopsis thaliana; identical to SEQ ID NO: 40073
  peptide (1)..(288): Ceres Seq. ID no. 13615164

SEQ ID NO: 115750 - protein, 241 aa, Arabidopsis thaliana; identical to SEQ ID NO: 40074
  peptide (1)..(241): Ceres Seq. ID no. 13615165

SEQ ID NO: 115751 - DNA, 1521 bp, Arabidopsis thaliana; identical to SEQ ID NO: 104512
  misc_feature (1)..(1521): Ceres Seq. ID no. 13615166
  misc_feature (1)..(1521): Ortholog of  Ceres SEQ ID NO 13502943 as cited in SEQ ID NO 65097

SEQ ID NO: 115752 - protein, 437 aa, Arabidopsis thaliana; identical to SEQ ID NO: 104513
  peptide (1)..(437): Ceres Seq. ID no. 13615167

SEQ ID NO: 115753 - protein, 424 aa, Arabidopsis thaliana; identical to SEQ ID NO: 104514
  peptide (1)..(424): Ceres Seq. ID no. 13615168

SEQ ID NO: 115754 - protein, 309 aa, Arabidopsis thaliana; identical to SEQ ID NO: 104515
  peptide (1)..(309): Ceres Seq. ID no. 13615169

SEQ ID NO: 115755 - DNA, 497 bp, Arabidopsis thaliana; identical to SEQ ID NO: 104516
  misc_feature (1)..(497): Ceres Seq. ID no. 13615170
  misc_feature (1)..(497): Ortholog of  Ceres SEQ ID NO 12606011 as cited in SEQ ID NO 20354

SEQ ID NO: 115756 - protein, 82 aa, Arabidopsis thaliana; identical to SEQ ID NO: 104517
  peptide (1)..(82): Ceres Seq. ID no. 13615171

SEQ ID NO: 115757 - protein, 71 aa, Arabidopsis thaliana; identical to SEQ ID NO: 104518
  peptide (1)..(71): Ceres Seq. ID no. 13615172

SEQ ID NO: 115758 - protein, 53 aa, Arabidopsis thaliana; identical to SEQ ID NO: 104519
  peptide (1)..(53): Ceres Seq. ID no. 13615173

SEQ ID NO: 115759 - DNA, 1562 bp, Arabidopsis thaliana; identical to SEQ ID NO: 104520
  misc_feature (1)..(1562): Ceres Seq. ID no. 13615174
  misc_feature (1)..(1562): Ortholog of  Ceres SEQ ID NO 13594345 as cited in SEQ ID NO 58043
  misc_feature (1)..(1562): Ortholog of  Ceres SEQ ID NO 12614112 as cited in SEQ ID NO 60891
  misc_feature (1)..(1562): Ortholog of  Ceres SEQ ID NO 13597574 as cited in SEQ ID NO 64677
  misc_feature (1)..(1562): Ortholog of  Ceres SEQ ID NO 13597678 as cited in SEQ ID NO 65375
  misc_feature (1)..(1562): Ortholog of  Ceres SEQ ID NO 13662880 as cited in SEQ ID NO 65422
  misc_feature (1)..(1562): Ortholog of  Ceres SEQ ID NO 12779098 as cited in SEQ ID NO 67698
  misc_feature (1)..(1562): Ortholog of  Ceres SEQ ID NO 13596180 as cited in SEQ ID NO 67941
  misc_feature (1)..(1562): Ortholog of  Ceres SEQ ID NO 13591190 as cited in SEQ ID NO 68044
  misc_feature (1)..(1562): Ortholog of  Ceres SEQ ID NO 13596089 as cited in SEQ ID NO 68373

SEQ ID NO: 115760 - protein, 487 aa, Arabidopsis thaliana; identical to SEQ ID NO: 104521
  peptide (1)..(487): Ceres Seq. ID no. 13615175

SEQ ID NO: 115761 - protein, 482 aa, Arabidopsis thaliana; identical to SEQ ID NO: 104522
  peptide (1)..(482): Ceres Seq. ID no. 13615176

SEQ ID NO: 115762 - protein, 353 aa, Arabidopsis thaliana; identical to SEQ ID NO: 104523
  peptide (1)..(353): Ceres Seq. ID no. 13615177

SEQ ID NO: 115763 - DNA, 1396 bp, Arabidopsis thaliana; identical to SEQ ID NO: 104524
  misc_feature (1)..(1396): Ceres Seq. ID no. 13615198
  misc_feature (1)..(1396): Ortholog of  Ceres SEQ ID NO 15171355 as cited in SEQ ID NO 51485

SEQ ID NO: 115764 - protein, 316 aa, Arabidopsis thaliana; identical to SEQ ID NO: 27612
  peptide (1)..(316): Ceres Seq. ID no. 13615199

SEQ ID NO: 115765 - protein, 242 aa, Arabidopsis thaliana; identical to SEQ ID NO: 27613
  peptide (1)..(242): Ceres Seq. ID no. 13615200

SEQ ID NO: 115766 - DNA, 939 bp, Arabidopsis thaliana; identical to SEQ ID NO: 104527
  misc_feature (1)..(939): Ceres Seq. ID no. 13615219
  misc_feature (1)..(939): Ortholog of  Ceres SEQ ID NO 13595452 as cited in SEQ ID NO 56454

SEQ ID NO: 115767 - protein, 263 aa, Arabidopsis thaliana; identical to SEQ ID NO: 26246
  peptide (1)..(263): Ceres Seq. ID no. 13615220

SEQ ID NO: 115768 - protein, 236 aa, Arabidopsis thaliana; identical to SEQ ID NO: 26247
  peptide (1)..(236): Ceres Seq. ID no. 13615221

SEQ ID NO: 115769 - protein, 208 aa, Arabidopsis thaliana; identical to SEQ ID NO: 26248
  peptide (1)..(208): Ceres Seq. ID no. 13615222

SEQ ID NO: 115770 - DNA, 796 bp, Arabidopsis thaliana; identical to SEQ ID NO: 104531
  misc_feature (1)..(796): Ceres Seq. ID no. 13615227
  misc_feature (1)..(796): Ortholog of  Ceres SEQ ID NO 13598422 as cited in SEQ ID NO 68856

SEQ ID NO: 115771 - protein, 170 aa, Arabidopsis thaliana; identical to SEQ ID NO: 31063
  peptide (1)..(170): Ceres Seq. ID no. 13615228

SEQ ID NO: 115772 - protein, 121 aa, Arabidopsis thaliana; identical to SEQ ID NO: 31064
  peptide (1)..(121): Ceres Seq. ID no. 13615229

SEQ ID NO: 115773 - DNA, 1300 bp, Arabidopsis thaliana; identical to SEQ ID NO: 104534
  misc_feature (1)..(1300): Ceres Seq. ID no. 13615230
  misc_feature (1)..(1300): Ortholog of  Ceres SEQ ID NO 13639663 as cited in SEQ ID NO 57850

SEQ ID NO: 115774 - protein, 350 aa, Arabidopsis thaliana; identical to SEQ ID NO: 104535
  peptide (1)..(350): Ceres Seq. ID no. 13615231

SEQ ID NO: 115775 - protein, 323 aa, Arabidopsis thaliana; identical to SEQ ID NO: 104536
  peptide (1)..(323): Ceres Seq. ID no. 13615232

SEQ ID NO: 115776 - protein, 295 aa, Arabidopsis thaliana; identical to SEQ ID NO: 104537
  peptide (1)..(295): Ceres Seq. ID no. 13615233

SEQ ID NO: 115777 - DNA, 1081 bp, Arabidopsis thaliana; identical to SEQ ID NO: 104538
  misc_feature (1)..(1081): Ceres Seq. ID no. 13615237
  misc_feature (1)..(1081): Ortholog of  Ceres SEQ ID NO 12557497 as cited in SEQ ID NO 43
  misc_feature (1)..(1081): Ortholog of  Ceres SEQ ID NO 15177850 as cited in SEQ ID NO 51765
  misc_feature (1)..(1081): Ortholog of  Ceres SEQ ID NO 14303417 as cited in SEQ ID NO 54923
  misc_feature (1)..(1081): Ortholog of  Ceres SEQ ID NO 15169084 as cited in SEQ ID NO 59115
  misc_feature (1)..(1081): Ortholog of  Ceres SEQ ID NO 12635723 as cited in SEQ ID NO 0

SEQ ID NO: 115778 - protein, 287 aa, Arabidopsis thaliana; identical to SEQ ID NO: 34996
  peptide (1)..(287): Ceres Seq. ID no. 13615238

SEQ ID NO: 115779 - protein, 274 aa, Arabidopsis thaliana; identical to SEQ ID NO: 34997
  peptide (1)..(274): Ceres Seq. ID no. 13615239

SEQ ID NO: 115780 - protein, 143 aa, Arabidopsis thaliana; identical to SEQ ID NO: 34998
  peptide (1)..(143): Ceres Seq. ID no. 13615240

SEQ ID NO: 115781 - DNA, 1495 bp, Arabidopsis thaliana; identical to SEQ ID NO: 104542
  misc_feature (1)..(1495): Ceres Seq. ID no. 13615241
  misc_feature (1)..(1495): Ortholog of  Ceres SEQ ID NO 13584744 as cited in SEQ ID NO 69137

SEQ ID NO: 115782 - protein, 393 aa, Arabidopsis thaliana; identical to SEQ ID NO: 41872
  peptide (1)..(393): Ceres Seq. ID no. 13615242

SEQ ID NO: 115783 - protein, 383 aa, Arabidopsis thaliana; identical to SEQ ID NO: 41873
  peptide (1)..(383): Ceres Seq. ID no. 13615243

SEQ ID NO: 115784 - DNA, 1793 bp, Arabidopsis thaliana; identical to SEQ ID NO: 104545
  misc_feature (1)..(1793): Ceres Seq. ID no. 13615252
  misc_feature (1)..(1793): Ortholog of  Ceres SEQ ID NO 13600220 as cited in SEQ ID NO 0

SEQ ID NO: 115785 - protein, 524 aa, Arabidopsis thaliana; identical to SEQ ID NO: 22472
  peptide (1)..(524): Ceres Seq. ID no. 13615253

SEQ ID NO: 115786 - protein, 423 aa, Arabidopsis thaliana; identical to SEQ ID NO: 22473
  peptide (1)..(423): Ceres Seq. ID no. 13615254

SEQ ID NO: 115787 - protein, 413 aa, Arabidopsis thaliana; identical to SEQ ID NO: 22474
  peptide (1)..(413): Ceres Seq. ID no. 13615255

SEQ ID NO: 115788 - DNA, 1464 bp, Arabidopsis thaliana; identical to SEQ ID NO: 104549
  misc_feature (1)..(1464): Ceres Seq. ID no. 13615259
  misc_feature (1)..(1464): Ortholog of  Ceres SEQ ID NO 14304838 as cited in SEQ ID NO 59750

SEQ ID NO: 115789 - protein, 363 aa, Arabidopsis thaliana; identical to SEQ ID NO: 30785
  peptide (1)..(363): Ceres Seq. ID no. 13615260

SEQ ID NO: 115790 - protein, 327 aa, Arabidopsis thaliana; identical to SEQ ID NO: 30786
  peptide (1)..(327): Ceres Seq. ID no. 13615261

SEQ ID NO: 115791 - protein, 324 aa, Arabidopsis thaliana; identical to SEQ ID NO: 30787
  peptide (1)..(324): Ceres Seq. ID no. 13615262

SEQ ID NO: 115792 - DNA, 937 bp, Arabidopsis thaliana; identical to SEQ ID NO: 104553
  misc_feature (1)..(937): Ceres Seq. ID no. 13615266
  misc_feature (1)..(937): Ortholog of  Ceres SEQ ID NO 15175519 as cited in SEQ ID NO 1110
  misc_feature (1)..(937): Ortholog of  Ceres SEQ ID NO 13637980 as cited in SEQ ID NO 58973
  misc_feature (1)..(937): Ortholog of  Ceres SEQ ID NO 12624081 as cited in SEQ ID NO 61729
  misc_feature (1)..(937): Ortholog of  Ceres SEQ ID NO 13599435 as cited in SEQ ID NO 0

SEQ ID NO: 115793 - protein, 231 aa, Arabidopsis thaliana; identical to SEQ ID NO: 104554
  peptide (1)..(231): Ceres Seq. ID no. 13615267

SEQ ID NO: 115794 - protein, 216 aa, Arabidopsis thaliana; identical to SEQ ID NO: 25091
  peptide (1)..(216): Ceres Seq. ID no. 13615268

SEQ ID NO: 115795 - DNA, 1528 bp, Arabidopsis thaliana; identical to SEQ ID NO: 104556
  misc_feature (1)..(1528): Ceres Seq. ID no. 13615273
  misc_feature (1)..(1528): Ortholog of  Ceres SEQ ID NO 14303423 as cited in SEQ ID NO 54243
  misc_feature (1)..(1528): Ortholog of  Ceres SEQ ID NO 12611314 as cited in SEQ ID NO 56535
  misc_feature (1)..(1528): Ortholog of  Ceres SEQ ID NO 14312016 as cited in SEQ ID NO 60412
  misc_feature (1)..(1528): Ortholog of  Ceres SEQ ID NO 13661438 as cited in SEQ ID NO 61414

SEQ ID NO: 115796 - protein, 374 aa, Arabidopsis thaliana; identical to SEQ ID NO: 104557
  peptide (1)..(374): Ceres Seq. ID no. 13615274

SEQ ID NO: 115797 - protein, 371 aa, Arabidopsis thaliana; identical to SEQ ID NO: 104558
  peptide (1)..(371): Ceres Seq. ID no. 13615275

SEQ ID NO: 115798 - DNA, 1096 bp, Arabidopsis thaliana; identical to SEQ ID NO: 104559
  misc_feature (1)..(1096): Ceres Seq. ID no. 13615282
  misc_feature (1)..(1096): Ortholog of  Ceres SEQ ID NO 15168856 as cited in SEQ ID NO 56354
  misc_feature (1)..(1096): Ortholog of  Ceres SEQ ID NO 13583591 as cited in SEQ ID NO 63084

SEQ ID NO: 115799 - protein, 179 aa, Arabidopsis thaliana; identical to SEQ ID NO: 29444
  peptide (1)..(179): Ceres Seq. ID no. 13615283

SEQ ID NO: 115800 - protein, 151 aa, Arabidopsis thaliana; identical to SEQ ID NO: 29445
  peptide (1)..(151): Ceres Seq. ID no. 13615284

SEQ ID NO: 115801 - protein, 148 aa, Arabidopsis thaliana; identical to SEQ ID NO: 29446
  peptide (1)..(148): Ceres Seq. ID no. 13615285

SEQ ID NO: 115802 - DNA, 869 bp, Arabidopsis thaliana; identical to SEQ ID NO: 104563
  misc_feature (1)..(869): Ceres Seq. ID no. 13615286
  misc_feature (1)..(869): Ortholog of  Ceres SEQ ID NO 13595495 as cited in SEQ ID NO 56624
  misc_feature (1)..(869): Ortholog of  Ceres SEQ ID NO 12608406 as cited in SEQ ID NO 58017
  misc_feature (1)..(869): Ortholog of  Ceres SEQ ID NO 13599397 as cited in SEQ ID NO 0

SEQ ID NO: 115803 - protein, 191 aa, Arabidopsis thaliana; identical to SEQ ID NO: 104564
  peptide (1)..(191): Ceres Seq. ID no. 13615287

SEQ ID NO: 115804 - protein, 184 aa, Arabidopsis thaliana; identical to SEQ ID NO: 104565
  peptide (1)..(184): Ceres Seq. ID no. 13615288

SEQ ID NO: 115805 - protein, 166 aa, Arabidopsis thaliana; identical to SEQ ID NO: 104566
  peptide (1)..(166): Ceres Seq. ID no. 13615289

SEQ ID NO: 115806 - DNA, 1553 bp, Arabidopsis thaliana; identical to SEQ ID NO: 104567
  misc_feature (1)..(1553): Ceres Seq. ID no. 13615297
  misc_feature (1)..(1553): Ortholog of  Ceres SEQ ID NO 13584744 as cited in SEQ ID NO 69137

SEQ ID NO: 115807 - protein, 434 aa, Arabidopsis thaliana; identical to SEQ ID NO: 35951
  peptide (1)..(434): Ceres Seq. ID no. 13615298

SEQ ID NO: 115808 - protein, 302 aa, Arabidopsis thaliana; identical to SEQ ID NO: 35952
  peptide (1)..(302): Ceres Seq. ID no. 13615299

SEQ ID NO: 115809 - protein, 251 aa, Arabidopsis thaliana; identical to SEQ ID NO: 35953
  peptide (1)..(251): Ceres Seq. ID no. 13615300

SEQ ID NO: 115810 - DNA, 805 bp, Arabidopsis thaliana; identical to SEQ ID NO: 104571
  misc_feature (1)..(805): Ceres Seq. ID no. 13615301
  misc_feature (1)..(805): Ortholog of  Ceres SEQ ID NO 15180167 as cited in SEQ ID NO 0

SEQ ID NO: 115811 - protein, 182 aa, Arabidopsis thaliana; identical to SEQ ID NO: 104572
  peptide (1)..(182): Ceres Seq. ID no. 13615302

SEQ ID NO: 115812 - protein, 146 aa, Arabidopsis thaliana; identical to SEQ ID NO: 104573
  peptide (1)..(146): Ceres Seq. ID no. 13615303

SEQ ID NO: 115813 - protein, 131 aa, Arabidopsis thaliana; identical to SEQ ID NO: 104574
  peptide (1)..(131): Ceres Seq. ID no. 13615304

SEQ ID NO: 115814 - DNA, 1304 bp, Arabidopsis thaliana; identical to SEQ ID NO: 104575
  misc_feature (1)..(1304): Ceres Seq. ID no. 13615328
  misc_feature (1)..(1304): Ortholog of  Ceres SEQ ID NO 12609045 as cited in SEQ ID NO 51314
  misc_feature (1)..(1304): Ortholog of  Ceres SEQ ID NO 14316312 as cited in SEQ ID NO 60042
  misc_feature (1)..(1304): Ortholog of  Ceres SEQ ID NO 13595877 as cited in SEQ ID NO 67702
  misc_feature (1)..(1304): Ortholog of  Ceres SEQ ID NO 13654367 as cited in SEQ ID NO 67993

SEQ ID NO: 115815 - protein, 361 aa, Arabidopsis thaliana; identical to SEQ ID NO: 23817
  peptide (1)..(361): Ceres Seq. ID no. 13615329

SEQ ID NO: 115816 - protein, 344 aa, Arabidopsis thaliana; identical to SEQ ID NO: 23818
  peptide (1)..(344): Ceres Seq. ID no. 13615330

SEQ ID NO: 115817 - DNA, 872 bp, Arabidopsis thaliana; identical to SEQ ID NO: 104578
  misc_feature (1)..(872): Ceres Seq. ID no. 13615331
  misc_feature (1)..(872): Ortholog of  Ceres SEQ ID NO 12557850 as cited in SEQ ID NO 65
  misc_feature (1)..(872): Ortholog of  Ceres SEQ ID NO 14312702 as cited in SEQ ID NO 0

SEQ ID NO: 115818 - protein, 190 aa, Arabidopsis thaliana [sequence omitted]

SEQ ID NO: 115819 - protein, 139 aa, Arabidopsis thaliana; identical to SEQ ID NO: 35491
  peptide (1)..(139): Ceres Seq. ID no. 13615333

SEQ ID NO: 115820 - DNA, 924 bp, Arabidopsis thaliana; identical to SEQ ID NO: 104581
  misc_feature (1)..(924): Ceres Seq. ID no. 13615334
  misc_feature (1)..(924): Ortholog of  Ceres SEQ ID NO 14311392 as cited in SEQ ID NO 58307
  misc_feature (1)..(924): Ortholog of  Ceres SEQ ID NO 13599348 as cited in SEQ ID NO 0

SEQ ID NO: 115821 - protein, 240 aa, Arabidopsis thaliana; identical to SEQ ID NO: 104582
  peptide (1)..(240): Ceres Seq. ID no. 13615335

SEQ ID NO: 115822 - protein, 172 aa, Arabidopsis thaliana; identical to SEQ ID NO: 20863
  peptide (1)..(172): Ceres Seq. ID no. 13615336

SEQ ID NO: 115823 - protein, 160 aa, Arabidopsis thaliana; identical to SEQ ID NO: 20864
  peptide (1)..(160): Ceres Seq. ID no. 13615337

SEQ ID NO: 115824 - DNA, 1803 bp, Arabidopsis thaliana; identical to SEQ ID NO: 104585
  misc_feature (1)..(1803): Ceres Seq. ID no. 13615342
  misc_feature (1)..(1803): Ortholog of  Ceres SEQ ID NO 14309715 as cited in SEQ ID NO 55353
  misc_feature (1)..(1803): Ortholog of  Ceres SEQ ID NO 13595521 as cited in SEQ ID NO 59840

SEQ ID NO: 115825 - protein, 504 aa, Arabidopsis thaliana; identical to SEQ ID NO: 104586
  peptide (1)..(504): Ceres Seq. ID no. 13615343

SEQ ID NO: 115826 - protein, 501 aa, Arabidopsis thaliana; identical to SEQ ID NO: 104587
  peptide (1)..(501): Ceres Seq. ID no. 13615344

SEQ ID NO: 115827 - protein, 496 aa, Arabidopsis thaliana; identical to SEQ ID NO: 104588
  peptide (1)..(496): Ceres Seq. ID no. 13615345

SEQ ID NO: 115828 - DNA, 855 bp, Arabidopsis thaliana; identical to SEQ ID NO: 104589
  misc_feature (1)..(855): Ceres Seq. ID no. 13615346
  misc_feature (1)..(855): Ortholog of  Ceres SEQ ID NO 13663563 as cited in SEQ ID NO 66853

SEQ ID NO: 115829 - protein, 183 aa, Arabidopsis thaliana; identical to SEQ ID NO: 104590
  peptide (1)..(183): Ceres Seq. ID no. 13615347

SEQ ID NO: 115830 - protein, 150 aa, Arabidopsis thaliana; identical to SEQ ID NO: 30540
  peptide (1)..(150): Ceres Seq. ID no. 13615348

SEQ ID NO: 115831 - protein, 101 aa, Arabidopsis thaliana; identical to SEQ ID NO: 104592
  peptide (1)..(101): Ceres Seq. ID no. 13615349

SEQ ID NO: 115832 - DNA, 1316 bp, Arabidopsis thaliana; identical to SEQ ID NO: 104593
  misc_feature (1)..(1316): Ceres Seq. ID no. 13615350
  misc_feature (1)..(1316): Ortholog of  Ceres SEQ ID NO 13657014 as cited in SEQ ID NO 65644
  misc_feature (1)..(1316): Ortholog of  Ceres SEQ ID NO 15176878 as cited in SEQ ID NO 0

SEQ ID NO: 115833 - protein, 334 aa, Arabidopsis thaliana; identical to SEQ ID NO: 28109
  peptide (1)..(334): Ceres Seq. ID no. 13615351

SEQ ID NO: 115834 - protein, 315 aa, Arabidopsis thaliana; identical to SEQ ID NO: 28110
  peptide (1)..(315): Ceres Seq. ID no. 13615352

SEQ ID NO: 115835 - protein, 243 aa, Arabidopsis thaliana; identical to SEQ ID NO: 28111
  peptide (1)..(243): Ceres Seq. ID no. 13615353

SEQ ID NO: 115836 - DNA, 1233 bp, Arabidopsis thaliana; identical to SEQ ID NO: 104597
  misc_feature (1)..(1233): Ceres Seq. ID no. 13615354
  misc_feature (1)..(1233): Ortholog of  Ceres SEQ ID NO 14314272 as cited in SEQ ID NO 57461
  misc_feature (1)..(1233): Ortholog of  Ceres SEQ ID NO 15170602 as cited in SEQ ID NO 57485

SEQ ID NO: 115837 - protein, 280 aa, Arabidopsis thaliana; identical to SEQ ID NO: 76139
  peptide (1)..(280): Ceres Seq. ID no. 13615355

SEQ ID NO: 115838 - DNA, 769 bp, Arabidopsis thaliana; identical to SEQ ID NO: 104599
  misc_feature (1)..(769): Ceres Seq. ID no. 13615360
  misc_feature (1)..(769): Ortholog of  Ceres SEQ ID NO 13581866 as cited in SEQ ID NO 52179
  misc_feature (1)..(769): Ortholog of  Ceres SEQ ID NO 14315451 as cited in SEQ ID NO 59289

SEQ ID NO: 115839 - protein, 166 aa, Arabidopsis thaliana; identical to SEQ ID NO: 29350
  peptide (1)..(166): Ceres Seq. ID no. 13615361

SEQ ID NO: 115840 - DNA, 901 bp, Arabidopsis thaliana; identical to SEQ ID NO: 104601
  misc_feature (1)..(901): Ceres Seq. ID no. 13615362
  misc_feature (1)..(901): Ortholog of  Ceres SEQ ID NO 14316436 as cited in SEQ ID NO 59213

SEQ ID NO: 115841 - protein, 204 aa, Arabidopsis thaliana; identical to SEQ ID NO: 104602
  peptide (1)..(204): Ceres Seq. ID no. 13615363

SEQ ID NO: 115842 - protein, 183 aa, Arabidopsis thaliana; identical to SEQ ID NO: 104603
  peptide (1)..(183): Ceres Seq. ID no. 13615364

SEQ ID NO: 115843 - protein, 118 aa, Arabidopsis thaliana; identical to SEQ ID NO: 30545
  peptide (1)..(118): Ceres Seq. ID no. 13615365

SEQ ID NO: 115844 - DNA, 2159 bp, Arabidopsis thaliana; identical to SEQ ID NO: 104605
  misc_feature (1)..(2159): Ceres Seq. ID no. 13615366
  misc_feature (1)..(2159): Ortholog of  Ceres SEQ ID NO 14306319 as cited in SEQ ID NO 59927

SEQ ID NO: 115845 - protein, 415 aa, Arabidopsis thaliana; identical to SEQ ID NO: 104606
  peptide (1)..(415): Ceres Seq. ID no. 13615367

SEQ ID NO: 115846 - protein, 402 aa, Arabidopsis thaliana; identical to SEQ ID NO: 104607
  peptide (1)..(402): Ceres Seq. ID no. 13615368

SEQ ID NO: 115847 - protein, 324 aa, Arabidopsis thaliana; identical to SEQ ID NO: 104608
  peptide (1)..(324): Ceres Seq. ID no. 13615369

SEQ ID NO: 115848 - DNA, 1039 bp, Arabidopsis thaliana; identical to SEQ ID NO: 104609
  misc_feature (1)..(1039): Ceres Seq. ID no. 13615370
  misc_feature (1)..(1039): Ortholog of  Ceres SEQ ID NO 13494980 as cited in SEQ ID NO 51049

SEQ ID NO: 115849 - protein, 249 aa, Arabidopsis thaliana; identical to SEQ ID NO: 104610
  peptide (1)..(249): Ceres Seq. ID no. 13615371

SEQ ID NO: 115850 - protein, 131 aa, Arabidopsis thaliana; identical to SEQ ID NO: 20885
  peptide (1)..(131): Ceres Seq. ID no. 13615372

SEQ ID NO: 115851 - DNA, 1005 bp, Arabidopsis thaliana; identical to SEQ ID NO: 104612
  misc_feature (1)..(1005): Ceres Seq. ID no. 13615373
  misc_feature (1)..(1005): Ortholog of  Ceres SEQ ID NO 13585286 as cited in SEQ ID NO 62478
  misc_feature (1)..(1005): Ortholog of  Ceres SEQ ID NO 13503500 as cited in SEQ ID NO 68001
  misc_feature (1)..(1005): Ortholog of  Ceres SEQ ID NO 15174327 as cited in SEQ ID NO 0

SEQ ID NO: 115852 - protein, 287 aa, Arabidopsis thaliana; identical to SEQ ID NO: 104613
  peptide (1)..(287): Ceres Seq. ID no. 13615374

SEQ ID NO: 115853 - protein, 246 aa, Arabidopsis thaliana; identical to SEQ ID NO: 104614
  peptide (1)..(246): Ceres Seq. ID no. 13615375

SEQ ID NO: 115854 - protein, 192 aa, Arabidopsis thaliana; identical to SEQ ID NO: 104615
  peptide (1)..(192): Ceres Seq. ID no. 13615376

SEQ ID NO: 115855 - DNA, 1148 bp, Arabidopsis thaliana; identical to SEQ ID NO: 104616
  misc_feature (1)..(1148): Ceres Seq. ID no. 13615377
  misc_feature (1)..(1148): Ortholog of  Ceres SEQ ID NO 14312166 as cited in SEQ ID NO 59253

SEQ ID NO: 115856 - protein, 307 aa, Arabidopsis thaliana; identical to SEQ ID NO: 104617
  peptide (1)..(307): Ceres Seq. ID no. 13615378

SEQ ID NO: 115857 - protein, 297 aa, Arabidopsis thaliana; identical to SEQ ID NO: 104618
  peptide (1)..(297): Ceres Seq. ID no. 13615379

SEQ ID NO: 115858 - protein, 236 aa, Arabidopsis thaliana; identical to SEQ ID NO: 104619
  peptide (1)..(236): Ceres Seq. ID no. 13615380

SEQ ID NO: 115859 - DNA, 657 bp, Arabidopsis thaliana; identical to SEQ ID NO: 104620
  misc_feature (1)..(657): Ceres Seq. ID no. 13615385
  misc_feature (1)..(657): Ortholog of  Ceres SEQ ID NO 15173015 as cited in SEQ ID NO 51216

SEQ ID NO: 115860 - protein, 175 aa, Arabidopsis thaliana; identical to SEQ ID NO: 104621
  peptide (1)..(175): Ceres Seq. ID no. 13615386

SEQ ID NO: 115861 - protein, 155 aa, Arabidopsis thaliana; identical to SEQ ID NO: 26255
  peptide (1)..(155): Ceres Seq. ID no. 13615387

SEQ ID NO: 115862 - protein, 141 aa, Arabidopsis thaliana; identical to SEQ ID NO: 26256
  peptide (1)..(141): Ceres Seq. ID no. 13615388

SEQ ID NO: 115863 - DNA, 668 bp, Arabidopsis thaliana; identical to SEQ ID NO: 104624
  misc_feature (1)..(668): Ceres Seq. ID no. 13615389
  misc_feature (1)..(668): Ortholog of  Ceres SEQ ID NO 15173015 as cited in SEQ ID NO 51216

SEQ ID NO: 115864 - protein, 173 aa, Arabidopsis thaliana; identical to SEQ ID NO: 104625
  peptide (1)..(173): Ceres Seq. ID no. 13615390

SEQ ID NO: 115865 - protein, 156 aa, Arabidopsis thaliana; identical to SEQ ID NO: 42333
  peptide (1)..(156): Ceres Seq. ID no. 13615391

SEQ ID NO: 115866 - protein, 140 aa, Arabidopsis thaliana; identical to SEQ ID NO: 42334
  peptide (1)..(140): Ceres Seq. ID no. 13615392

SEQ ID NO: 115867 - DNA, 1316 bp, Arabidopsis thaliana; identical to SEQ ID NO: 104628
  misc_feature (1)..(1316): Ceres Seq. ID no. 13615434
  misc_feature (1)..(1316): Ortholog of  Ceres SEQ ID NO 14312844 as cited in SEQ ID NO 55601
  misc_feature (1)..(1316): Ortholog of  Ceres SEQ ID NO 14312866 as cited in SEQ ID NO 55630
  misc_feature (1)..(1316): Ortholog of  Ceres SEQ ID NO 13597376 as cited in SEQ ID NO 64002
  misc_feature (1)..(1316): Ortholog of  Ceres SEQ ID NO 13503573 as cited in SEQ ID NO 65402
  misc_feature (1)..(1316): Ortholog of  Ceres SEQ ID NO 13659615 as cited in SEQ ID NO 67248

SEQ ID NO: 115868 - protein, 350 aa, Arabidopsis thaliana; identical to SEQ ID NO: 28659
  peptide (1)..(350): Ceres Seq. ID no. 13615435

SEQ ID NO: 115869 - protein, 235 aa, Arabidopsis thaliana; identical to SEQ ID NO: 28660
  peptide (1)..(235): Ceres Seq. ID no. 13615436

SEQ ID NO: 115870 - DNA, 911 bp, Arabidopsis thaliana; identical to SEQ ID NO: 104631
  misc_feature (1)..(911): Ceres Seq. ID no. 13615441
  misc_feature (1)..(911): Ortholog of  Ceres SEQ ID NO 12557928 as cited in SEQ ID NO 111

SEQ ID NO: 115871 - protein, 179 aa, Arabidopsis thaliana; identical to SEQ ID NO: 104632
  peptide (1)..(179): Ceres Seq. ID no. 13615442

SEQ ID NO: 115872 - protein, 151 aa, Arabidopsis thaliana; identical to SEQ ID NO: 24048
  peptide (1)..(151): Ceres Seq. ID no. 13615443

SEQ ID NO: 115873 - protein, 130 aa, Arabidopsis thaliana; identical to SEQ ID NO: 24049
  peptide (1)..(130): Ceres Seq. ID no. 13615444

SEQ ID NO: 115874 - DNA, 1489 bp, Arabidopsis thaliana; identical to SEQ ID NO: 104635
  misc_feature (1)..(1489): Ceres Seq. ID no. 13615449
  misc_feature (1)..(1489): Ortholog of  Ceres SEQ ID NO 15171366 as cited in SEQ ID NO 51578
  misc_feature (1)..(1489): Ortholog of  Ceres SEQ ID NO 14308536 as cited in SEQ ID NO 55469
  misc_feature (1)..(1489): Ortholog of  Ceres SEQ ID NO 14314909 as cited in SEQ ID NO 58002

SEQ ID NO: 115875 - protein, 353 aa, Arabidopsis thaliana; identical to SEQ ID NO: 40099
  peptide (1)..(353): Ceres Seq. ID no. 13615450

SEQ ID NO: 115876 - protein, 348 aa, Arabidopsis thaliana; identical to SEQ ID NO: 40100
  peptide (1)..(348): Ceres Seq. ID no. 13615451

SEQ ID NO: 115877 - protein, 347 aa, Arabidopsis thaliana; identical to SEQ ID NO: 40101
  peptide (1)..(347): Ceres Seq. ID no. 13615452

SEQ ID NO: 115878 - DNA, 1258 bp, Arabidopsis thaliana; identical to SEQ ID NO: 104639
  misc_feature (1)..(1258): Ceres Seq. ID no. 13615453
  misc_feature (1)..(1258): Ortholog of  Ceres SEQ ID NO 13596944 as cited in SEQ ID NO 68910

SEQ ID NO: 115879 - protein, 336 aa, Arabidopsis thaliana; identical to SEQ ID NO: 25408
  peptide (1)..(336): Ceres Seq. ID no. 13615454

SEQ ID NO: 115880 - protein, 235 aa, Arabidopsis thaliana; identical to SEQ ID NO: 25409
  peptide (1)..(235): Ceres Seq. ID no. 13615455

SEQ ID NO: 115881 - protein, 225 aa, Arabidopsis thaliana; identical to SEQ ID NO: 25410
  peptide (1)..(225): Ceres Seq. ID no. 13615456

SEQ ID NO: 115882 - DNA, 5365 bp, Arabidopsis thaliana; identical to SEQ ID NO: 104643
  misc_feature (1)..(5365): Ceres Seq. ID no. 13615465
  misc_feature (1)..(5365): Ortholog of  Ceres SEQ ID NO 13657915 as cited in SEQ ID NO 66051

SEQ ID NO: 115883 - protein, 1748 aa, Arabidopsis thaliana; identical to SEQ ID NO: 104644
  peptide (1)..(1748): Ceres Seq. ID no. 13615466

SEQ ID NO: 115884 - protein, 1705 aa, Arabidopsis thaliana; identical to SEQ ID NO: 104645
  peptide (1)..(1705): Ceres Seq. ID no. 13615467

SEQ ID NO: 115885 - protein, 1691 aa, Arabidopsis thaliana; identical to SEQ ID NO: 104646
  peptide (1)..(1691): Ceres Seq. ID no. 13615468

SEQ ID NO: 115886 - DNA, 1032 bp, Arabidopsis thaliana; identical to SEQ ID NO: 104647
  misc_feature (1)..(1032): Ceres Seq. ID no. 13615473
  misc_feature (1)..(1032): Ortholog of  Ceres SEQ ID NO 15225236 as cited in SEQ ID NO 66266

SEQ ID NO: 115887 - protein, 291 aa, Arabidopsis thaliana; identical to SEQ ID NO: 104648
  peptide (1)..(291): Ceres Seq. ID no. 13615474

SEQ ID NO: 115888 - protein, 284 aa, Arabidopsis thaliana; identical to SEQ ID NO: 104649
  peptide (1)..(284): Ceres Seq. ID no. 13615475

SEQ ID NO: 115889 - protein, 283 aa, Arabidopsis thaliana; identical to SEQ ID NO: 104650
  peptide (1)..(283): Ceres Seq. ID no. 13615476

SEQ ID NO: 115890 - DNA, 1797 bp, Arabidopsis thaliana; identical to SEQ ID NO: 104651
  misc_feature (1)..(1797): Ceres Seq. ID no. 13615477
  misc_feature (1)..(1797): Ortholog of  Ceres SEQ ID NO 14313216 as cited in SEQ ID NO 66103

SEQ ID NO: 115891 - protein, 530 aa, Arabidopsis thaliana; identical to SEQ ID NO: 104652
  peptide (1)..(530): Ceres Seq. ID no. 13615478

SEQ ID NO: 115892 - protein, 525 aa, Arabidopsis thaliana; identical to SEQ ID NO: 104653
  peptide (1)..(525): Ceres Seq. ID no. 13615479

SEQ ID NO: 115893 - protein, 421 aa, Arabidopsis thaliana; identical to SEQ ID NO: 104654
  peptide (1)..(421): Ceres Seq. ID no. 13615480

SEQ ID NO: 115894 - DNA, 2349 bp, Arabidopsis thaliana; identical to SEQ ID NO: 104655
  misc_feature (1)..(2349): Ceres Seq. ID no. 13615493
  misc_feature (1)..(2349): Ortholog of  Ceres SEQ ID NO 15169346 as cited in SEQ ID NO 53994

SEQ ID NO: 115895 - protein, 691 aa, Arabidopsis thaliana; identical to SEQ ID NO: 30697
  peptide (1)..(691): Ceres Seq. ID no. 13615494

SEQ ID NO: 115896 - protein, 690 aa, Arabidopsis thaliana; identical to SEQ ID NO: 30698
  peptide (1)..(690): Ceres Seq. ID no. 13615495

SEQ ID NO: 115897 - DNA, 1294 bp, Arabidopsis thaliana; identical to SEQ ID NO: 104658
  misc_feature (1)..(1294): Ceres Seq. ID no. 13615496
  misc_feature (1)..(1294): Ortholog of  Ceres SEQ ID NO 13638750 as cited in SEQ ID NO 52185

SEQ ID NO: 115898 - protein, 307 aa, Arabidopsis thaliana; identical to SEQ ID NO: 39451
  peptide (1)..(307): Ceres Seq. ID no. 13615497

SEQ ID NO: 115899 - protein, 247 aa, Arabidopsis thaliana; identical to SEQ ID NO: 39452
  peptide (1)..(247): Ceres Seq. ID no. 13615498

SEQ ID NO: 115900 - protein, 191 aa, Arabidopsis thaliana; identical to SEQ ID NO: 39453
  peptide (1)..(191): Ceres Seq. ID no. 13615499

SEQ ID NO: 115901 - DNA, 1049 bp, Arabidopsis thaliana; identical to SEQ ID NO: 104662
  misc_feature (1)..(1049): Ceres Seq. ID no. 13615504
  misc_feature (1)..(1049): Ortholog of  Ceres SEQ ID NO 14305878 as cited in SEQ ID NO 52309

SEQ ID NO: 115902 - protein, 286 aa, Arabidopsis thaliana; identical to SEQ ID NO: 104663
  peptide (1)..(286): Ceres Seq. ID no. 13615505

SEQ ID NO: 115903 - protein, 259 aa, Arabidopsis thaliana; identical to SEQ ID NO: 104664
  peptide (1)..(259): Ceres Seq. ID no. 13615506

SEQ ID NO: 115904 - protein, 239 aa, Arabidopsis thaliana; identical to SEQ ID NO: 104665
  peptide (1)..(239): Ceres Seq. ID no. 13615507

SEQ ID NO: 115905 - DNA, 1150 bp, Arabidopsis thaliana; identical to SEQ ID NO: 104666
  misc_feature (1)..(1150): Ceres Seq. ID no. 13615511
  misc_feature (1)..(1150): Ortholog of  Ceres SEQ ID NO 13661504 as cited in SEQ ID NO 61294
  misc_feature (1)..(1150): Ortholog of  Ceres SEQ ID NO 12615311 as cited in SEQ ID NO 62517
  misc_feature (1)..(1150): Ortholog of  Ceres SEQ ID NO 12617197 as cited in SEQ ID NO 63406
  misc_feature (1)..(1150): Ortholog of  Ceres SEQ ID NO 13598597 as cited in SEQ ID NO 65496
  misc_feature (1)..(1150): Ortholog of  Ceres SEQ ID NO 13596227 as cited in SEQ ID NO 68750
  misc_feature (1)..(1150): Ortholog of  Ceres SEQ ID NO 15179068 as cited in SEQ ID NO 0

SEQ ID NO: 115906 - protein, 304 aa, Arabidopsis thaliana; identical to SEQ ID NO: 104667
  peptide (1)..(304): Ceres Seq. ID no. 13615512

SEQ ID NO: 115907 - protein, 252 aa, Arabidopsis thaliana; identical to SEQ ID NO: 104668
  peptide (1)..(252): Ceres Seq. ID no. 13615513

SEQ ID NO: 115908 - DNA, 2385 bp, Arabidopsis thaliana; identical to SEQ ID NO: 104669
  misc_feature (1)..(2385): Ceres Seq. ID no. 13615522
  misc_feature (1)..(2385): Ortholog of  Ceres SEQ ID NO 13584744 as cited in SEQ ID NO 69137

SEQ ID NO: 115909 - protein, 634 aa, Arabidopsis thaliana; identical to SEQ ID NO: 20999
  peptide (1)..(634): Ceres Seq. ID no. 13615523

SEQ ID NO: 115910 - protein, 631 aa, Arabidopsis thaliana; identical to SEQ ID NO: 21000
  peptide (1)..(631): Ceres Seq. ID no. 13615524

SEQ ID NO: 115911 - protein, 626 aa, Arabidopsis thaliana; identical to SEQ ID NO: 21001
  peptide (1)..(626): Ceres Seq. ID no. 13615525

SEQ ID NO: 115912 - DNA, 1167 bp, Arabidopsis thaliana; identical to SEQ ID NO: 104673
  misc_feature (1)..(1167): Ceres Seq. ID no. 13615530
  misc_feature (1)..(1167): Ortholog of  Ceres SEQ ID NO 14316539 as cited in SEQ ID NO 57567

SEQ ID NO: 115913 - protein, 312 aa, Arabidopsis thaliana; identical to SEQ ID NO: 37566
  peptide (1)..(312): Ceres Seq. ID no. 13615531

SEQ ID NO: 115914 - protein, 204 aa, Arabidopsis thaliana; identical to SEQ ID NO: 37567
  peptide (1)..(204): Ceres Seq. ID no. 13615532

SEQ ID NO: 115915 - protein, 192 aa, Arabidopsis thaliana; identical to SEQ ID NO: 37568
  peptide (1)..(192): Ceres Seq. ID no. 13615533

SEQ ID NO: 115916 - DNA, 1040 bp, Arabidopsis thaliana; identical to SEQ ID NO: 104677
  misc_feature (1)..(1040): Ceres Seq. ID no. 13615538
  misc_feature (1)..(1040): Ortholog of  Ceres SEQ ID NO 15170627 as cited in SEQ ID NO 52703
  misc_feature (1)..(1040): Ortholog of  Ceres SEQ ID NO 13655124 as cited in SEQ ID NO 62896
  misc_feature (1)..(1040): Ortholog of  Ceres SEQ ID NO 13597493 as cited in SEQ ID NO 64613
  misc_feature (1)..(1040): Ortholog of  Ceres SEQ ID NO 14313540 as cited in SEQ ID NO 68110
  misc_feature (1)..(1040): Ortholog of  Ceres SEQ ID NO 13596175 as cited in SEQ ID NO 68297

SEQ ID NO: 115917 - protein, 301 aa, Arabidopsis thaliana; identical to SEQ ID NO: 104678
  peptide (1)..(301): Ceres Seq. ID no. 13615539

SEQ ID NO: 115918 - protein, 154 aa, Arabidopsis thaliana; identical to SEQ ID NO: 41728
  peptide (1)..(154): Ceres Seq. ID no. 13615540

SEQ ID NO: 115919 - DNA, 1040 bp, Arabidopsis thaliana; identical to SEQ ID NO: 104680
  misc_feature (1)..(1040): Ceres Seq. ID no. 13615553
  misc_feature (1)..(1040): Ortholog of  Ceres SEQ ID NO 15171366 as cited in SEQ ID NO 51578
  misc_feature (1)..(1040): Ortholog of  Ceres SEQ ID NO 15175723 as cited in SEQ ID NO 57875
  misc_feature (1)..(1040): Ortholog of  Ceres SEQ ID NO 14314909 as cited in SEQ ID NO 58002
  misc_feature (1)..(1040): Ortholog of  Ceres SEQ ID NO 15179772 as cited in SEQ ID NO 64248

SEQ ID NO: 115920 - protein, 345 aa, Arabidopsis thaliana; identical to SEQ ID NO: 104681
  peptide (1)..(345): Ceres Seq. ID no. 13615554

SEQ ID NO: 115921 - protein, 321 aa, Arabidopsis thaliana; identical to SEQ ID NO: 40359
  peptide (1)..(321): Ceres Seq. ID no. 13615555

SEQ ID NO: 115922 - protein, 316 aa, Arabidopsis thaliana; identical to SEQ ID NO: 40360
  peptide (1)..(316): Ceres Seq. ID no. 13615556

SEQ ID NO: 115923 - DNA, 1000 bp, Arabidopsis thaliana; identical to SEQ ID NO: 104684
  misc_feature (1)..(1000): Ceres Seq. ID no. 13615561
  misc_feature (1)..(1000): Ortholog of  Ceres SEQ ID NO 14305743 as cited in SEQ ID NO 52462
  misc_feature (1)..(1000): Ortholog of  Ceres SEQ ID NO 13623029 as cited in SEQ ID NO 0

SEQ ID NO: 115924 - protein, 240 aa, Arabidopsis thaliana; identical to SEQ ID NO: 104685
  peptide (1)..(240): Ceres Seq. ID no. 13615562

SEQ ID NO: 115925 - protein, 196 aa, Arabidopsis thaliana; identical to SEQ ID NO: 26467
  peptide (1)..(196): Ceres Seq. ID no. 13615563

SEQ ID NO: 115926 - DNA, 1765 bp, Arabidopsis thaliana; identical to SEQ ID NO: 104687
  misc_feature (1)..(1765): Ceres Seq. ID no. 13615575
  misc_feature (1)..(1765): Ortholog of  Ceres SEQ ID NO 13582285 as cited in SEQ ID NO 59817

SEQ ID NO: 115927 - protein, 551 aa, Arabidopsis thaliana; identical to SEQ ID NO: 104688
  peptide (1)..(551): Ceres Seq. ID no. 13615576

SEQ ID NO: 115928 - protein, 539 aa, Arabidopsis thaliana; identical to SEQ ID NO: 104689
  peptide (1)..(539): Ceres Seq. ID no. 13615577

SEQ ID NO: 115929 - protein, 345 aa, Arabidopsis thaliana; identical to SEQ ID NO: 104690
  peptide (1)..(345): Ceres Seq. ID no. 13615578

SEQ ID NO: 115930 - DNA, 1189 bp, Arabidopsis thaliana; identical to SEQ ID NO: 104691
  misc_feature (1)..(1189): Ceres Seq. ID no. 13615583
  misc_feature (1)..(1189): Ortholog of  Ceres SEQ ID NO 14306479 as cited in SEQ ID NO 53033

SEQ ID NO: 115931 - protein, 271 aa, Arabidopsis thaliana; identical to SEQ ID NO: 104692
  peptide (1)..(271): Ceres Seq. ID no. 13615584

SEQ ID NO: 115932 - protein, 228 aa, Arabidopsis thaliana; identical to SEQ ID NO: 104693
  peptide (1)..(228): Ceres Seq. ID no. 13615585

SEQ ID NO: 115933 - protein, 210 aa, Arabidopsis thaliana; identical to SEQ ID NO: 104694
  peptide (1)..(210): Ceres Seq. ID no. 13615586

SEQ ID NO: 115934 - DNA, 1127 bp, Arabidopsis thaliana; identical to SEQ ID NO: 104695
  misc_feature (1)..(1127): Ceres Seq. ID no. 13615595
  misc_feature (1)..(1127): Ortholog of  Ceres SEQ ID NO 15177607 as cited in SEQ ID NO 59136
  misc_feature (1)..(1127): Ortholog of  Ceres SEQ ID NO 15179183 as cited in SEQ ID NO 0

SEQ ID NO: 115935 - protein, 218 aa, Arabidopsis thaliana; identical to SEQ ID NO: 25607
  peptide (1)..(218): Ceres Seq. ID no. 13615596

SEQ ID NO: 115936 - protein, 173 aa, Arabidopsis thaliana; identical to SEQ ID NO: 25608
  peptide (1)..(173): Ceres Seq. ID no. 13615597

SEQ ID NO: 115937 - protein, 109 aa, Arabidopsis thaliana; identical to SEQ ID NO: 25609
  peptide (1)..(109): Ceres Seq. ID no. 13615598

SEQ ID NO: 115938 - DNA, 1632 bp, Arabidopsis thaliana; identical to SEQ ID NO: 104699
  misc_feature (1)..(1632): Ceres Seq. ID no. 13615615
  misc_feature (1)..(1632): Ortholog of  Ceres SEQ ID NO 14311942 as cited in SEQ ID NO 51516

SEQ ID NO: 115939 - protein, 456 aa, Arabidopsis thaliana; identical to SEQ ID NO: 21329
  peptide (1)..(456): Ceres Seq. ID no. 13615616

SEQ ID NO: 115940 - protein, 452 aa, Arabidopsis thaliana; identical to SEQ ID NO: 21330
  peptide (1)..(452): Ceres Seq. ID no. 13615617

SEQ ID NO: 115941 - protein, 426 aa, Arabidopsis thaliana; identical to SEQ ID NO: 21331
  peptide (1)..(426): Ceres Seq. ID no. 13615618

SEQ ID NO: 115942 - DNA, 689 bp, Arabidopsis thaliana; identical to SEQ ID NO: 104703
  misc_feature (1)..(689): Ceres Seq. ID no. 13615619
  misc_feature (1)..(689): Ortholog of  Ceres SEQ ID NO 15173170 as cited in SEQ ID NO 64240

SEQ ID NO: 115943 - protein, 148 aa, Arabidopsis thaliana; identical to SEQ ID NO: 28418
  peptide (1)..(148): Ceres Seq. ID no. 13615620

SEQ ID NO: 115944 - protein, 128 aa, Arabidopsis thaliana; identical to SEQ ID NO: 28419
  peptide (1)..(128): Ceres Seq. ID no. 13615621

SEQ ID NO: 115945 - protein, 74 aa, Arabidopsis thaliana; identical to SEQ ID NO: 28420
  peptide (1)..(74): Ceres Seq. ID no. 13615622

SEQ ID NO: 115946 - DNA, 1517 bp, Arabidopsis thaliana; identical to SEQ ID NO: 104707
  misc_feature (1)..(1517): Ceres Seq. ID no. 13615623
  misc_feature (1)..(1517): Ortholog of  Ceres SEQ ID NO 15225703 as cited in SEQ ID NO 59527
  misc_feature (1)..(1517): Ortholog of  Ceres SEQ ID NO 12615972 as cited in SEQ ID NO 62455
  misc_feature (1)..(1517): Ortholog of  Ceres SEQ ID NO 13596229 as cited in SEQ ID NO 68800
  misc_feature (1)..(1517): Ortholog of  Ceres SEQ ID NO 15179393 as cited in SEQ ID NO 0

SEQ ID NO: 115947 - protein, 389 aa, Arabidopsis thaliana; identical to SEQ ID NO: 104708
  peptide (1)..(389): Ceres Seq. ID no. 13615624

SEQ ID NO: 115948 - protein, 316 aa, Arabidopsis thaliana; identical to SEQ ID NO: 104709
  peptide (1)..(316): Ceres Seq. ID no. 13615625

SEQ ID NO: 115949 - protein, 291 aa, Arabidopsis thaliana; identical to SEQ ID NO: 104710
  peptide (1)..(291): Ceres Seq. ID no. 13615626

SEQ ID NO: 115950 - DNA, 543 bp, Arabidopsis thaliana; identical to SEQ ID NO: 104711
  misc_feature (1)..(543): Ceres Seq. ID no. 13615631
  misc_feature (1)..(543): Ortholog of  Ceres SEQ ID NO 13582124 as cited in SEQ ID NO 51028
  misc_feature (1)..(543): Ortholog of  Ceres SEQ ID NO 15176134 as cited in SEQ ID NO 0

SEQ ID NO: 115951 - protein, 83 aa, Arabidopsis thaliana; identical to SEQ ID NO: 27029
  peptide (1)..(83): Ceres Seq. ID no. 13615632

SEQ ID NO: 115952 - protein, 67 aa, Arabidopsis thaliana; identical to SEQ ID NO: 27031
  peptide (1)..(67): Ceres Seq. ID no. 13615633

SEQ ID NO: 115953 - protein, 62 aa, Arabidopsis thaliana; identical to SEQ ID NO: 35976
  peptide (1)..(62): Ceres Seq. ID no. 13615634

SEQ ID NO: 115954 - DNA, 1671 bp, Arabidopsis thaliana; identical to SEQ ID NO: 104715
  misc_feature (1)..(1671): Ceres Seq. ID no. 13615635
  misc_feature (1)..(1671): Ortholog of  Ceres SEQ ID NO 15227226 as cited in SEQ ID NO 54691
  misc_feature (1)..(1671): Ortholog of  Ceres SEQ ID NO 14303169 as cited in SEQ ID NO 65741

SEQ ID NO: 115955 - protein, 475 aa, Arabidopsis thaliana; identical to SEQ ID NO: 42943
  peptide (1)..(475): Ceres Seq. ID no. 13615636

SEQ ID NO: 115956 - protein, 465 aa, Arabidopsis thaliana; identical to SEQ ID NO: 42944
  peptide (1)..(465): Ceres Seq. ID no. 13615637

SEQ ID NO: 115957 - protein, 376 aa, Arabidopsis thaliana; identical to SEQ ID NO: 42945
  peptide (1)..(376): Ceres Seq. ID no. 13615638

SEQ ID NO: 115958 - DNA, 1131 bp, Arabidopsis thaliana; identical to SEQ ID NO: 104719
  misc_feature (1)..(1131): Ceres Seq. ID no. 13615639
  misc_feature (1)..(1131): Ortholog of  Ceres SEQ ID NO 14307312 as cited in SEQ ID NO 54745
  misc_feature (1)..(1131): Ortholog of  Ceres SEQ ID NO 14314194 as cited in SEQ ID NO 57366
  misc_feature (1)..(1131): Ortholog of  Ceres SEQ ID NO 13655305 as cited in SEQ ID NO 63328

SEQ ID NO: 115959 - protein, 264 aa, Arabidopsis thaliana; identical to SEQ ID NO: 104720
  peptide (1)..(264): Ceres Seq. ID no. 13615640

SEQ ID NO: 115960 - protein, 225 aa, Arabidopsis thaliana; identical to SEQ ID NO: 104721
  peptide (1)..(225): Ceres Seq. ID no. 13615641

SEQ ID NO: 115961 - protein, 197 aa, Arabidopsis thaliana; identical to SEQ ID NO: 104722
  peptide (1)..(197): Ceres Seq. ID no. 13615642

SEQ ID NO: 115962 - DNA, 1671 bp, Arabidopsis thaliana; identical to SEQ ID NO: 104723
  misc_feature (1)..(1671): Ceres Seq. ID no. 13615647
  misc_feature (1)..(1671): Ortholog of  Ceres SEQ ID NO 13597574 as cited in SEQ ID NO 64677
  misc_feature (1)..(1671): Ortholog of  Ceres SEQ ID NO 13597843 as cited in SEQ ID NO 64850
  misc_feature (1)..(1671): Ortholog of  Ceres SEQ ID NO 13597678 as cited in SEQ ID NO 65375
  misc_feature (1)..(1671): Ortholog of  Ceres SEQ ID NO 13662880 as cited in SEQ ID NO 65422
  misc_feature (1)..(1671): Ortholog of  Ceres SEQ ID NO 13596180 as cited in SEQ ID NO 67941
  misc_feature (1)..(1671): Ortholog of  Ceres SEQ ID NO 13591190 as cited in SEQ ID NO 68044
  misc_feature (1)..(1671): Ortholog of  Ceres SEQ ID NO 13595961 as cited in SEQ ID NO 68223

SEQ ID NO: 115963 - protein, 467 aa, Arabidopsis thaliana; identical to SEQ ID NO: 104724
  peptide (1)..(467): Ceres Seq. ID no. 13615648

SEQ ID NO: 115964 - protein, 427 aa, Arabidopsis thaliana; identical to SEQ ID NO: 104725
  peptide (1)..(427): Ceres Seq. ID no. 13615649

SEQ ID NO: 115965 - protein, 366 aa, Arabidopsis thaliana; identical to SEQ ID NO: 104726
  peptide (1)..(366): Ceres Seq. ID no. 13615650

SEQ ID NO: 115966 - DNA, 1527 bp, Arabidopsis thaliana; identical to SEQ ID NO: 104727
  misc_feature (1)..(1527): Ceres Seq. ID no. 13615651
  misc_feature (1)..(1527): Ortholog of  Ceres SEQ ID NO 15176325 as cited in SEQ ID NO 52802
  misc_feature (1)..(1527): Ortholog of  Ceres SEQ ID NO 15176313 as cited in SEQ ID NO 52831

SEQ ID NO: 115967 - protein, 427 aa, Arabidopsis thaliana; identical to SEQ ID NO: 104728
  peptide (1)..(427): Ceres Seq. ID no. 13615652

SEQ ID NO: 115968 - protein, 318 aa, Arabidopsis thaliana; identical to SEQ ID NO: 104729
  peptide (1)..(318): Ceres Seq. ID no. 13615653

SEQ ID NO: 115969 - protein, 224 aa, Arabidopsis thaliana; identical to SEQ ID NO: 22691
  peptide (1)..(224): Ceres Seq. ID no. 13615654

SEQ ID NO: 115970 - DNA, 1440 bp, Arabidopsis thaliana; identical to SEQ ID NO: 104731
  misc_feature (1)..(1440): Ceres Seq. ID no. 13615655
  misc_feature (1)..(1440): Ortholog of  Ceres SEQ ID NO 15177298 as cited in SEQ ID NO 52711

SEQ ID NO: 115971 - protein, 386 aa, Arabidopsis thaliana; identical to SEQ ID NO: 23723
  peptide (1)..(386): Ceres Seq. ID no. 13615656

SEQ ID NO: 115972 - protein, 382 aa, Arabidopsis thaliana; identical to SEQ ID NO: 23724
  peptide (1)..(382): Ceres Seq. ID no. 13615657

SEQ ID NO: 115973 - protein, 331 aa, Arabidopsis thaliana; identical to SEQ ID NO: 23725
  peptide (1)..(331): Ceres Seq. ID no. 13615658

SEQ ID NO: 115974 - DNA, 1465 bp, Arabidopsis thaliana; identical to SEQ ID NO: 104735
  misc_feature (1)..(1465): Ceres Seq. ID no. 13615659
  misc_feature (1)..(1465): Ortholog of  Ceres SEQ ID NO 13659033 as cited in SEQ ID NO 66372
  misc_feature (1)..(1465): Ortholog of  Ceres SEQ ID NO 13655724 as cited in SEQ ID NO 68973
  misc_feature (1)..(1465): Ortholog of  Ceres SEQ ID NO 12625899 as cited in SEQ ID NO 69079

SEQ ID NO: 115975 - protein, 434 aa, Arabidopsis thaliana; identical to SEQ ID NO: 104736
  peptide (1)..(434): Ceres Seq. ID no. 13615660

SEQ ID NO: 115976 - protein, 398 aa, Arabidopsis thaliana; identical to SEQ ID NO: 24726
  peptide (1)..(398): Ceres Seq. ID no. 13615661

SEQ ID NO: 115977 - protein, 277 aa, Arabidopsis thaliana; identical to SEQ ID NO: 24727
  peptide (1)..(277): Ceres Seq. ID no. 13615662

SEQ ID NO: 115978 - DNA, 1238 bp, Arabidopsis thaliana; identical to SEQ ID NO: 104739
  misc_feature (1)..(1238): Ceres Seq. ID no. 13615663
  misc_feature (1)..(1238): Ortholog of  Ceres SEQ ID NO 14314164 as cited in SEQ ID NO 54346
  misc_feature (1)..(1238): Ortholog of  Ceres SEQ ID NO 13595066 as cited in SEQ ID NO 55849
  misc_feature (1)..(1238): Ortholog of  Ceres SEQ ID NO 13597721 as cited in SEQ ID NO 65430
  misc_feature (1)..(1238): Ortholog of  Ceres SEQ ID NO 14309100 as cited in SEQ ID NO 0

SEQ ID NO: 115979 - protein, 302 aa, Arabidopsis thaliana; identical to SEQ ID NO: 23542
  peptide (1)..(302): Ceres Seq. ID no. 13615664

SEQ ID NO: 115980 - protein, 284 aa, Arabidopsis thaliana; identical to SEQ ID NO: 23543
  peptide (1)..(284): Ceres Seq. ID no. 13615665

SEQ ID NO: 115981 - DNA, 732 bp, Arabidopsis thaliana; identical to SEQ ID NO: 104742
  misc_feature (1)..(732): Ceres Seq. ID no. 13615666
  misc_feature (1)..(732): Ortholog of  Ceres SEQ ID NO 15178260 as cited in SEQ ID NO 59907

SEQ ID NO: 115982 - protein, 193 aa, Arabidopsis thaliana; identical to SEQ ID NO: 104743
  peptide (1)..(193): Ceres Seq. ID no. 13615667

SEQ ID NO: 115983 - protein, 142 aa, Arabidopsis thaliana; identical to SEQ ID NO: 21430
  peptide (1)..(142): Ceres Seq. ID no. 13615668

SEQ ID NO: 115984 - DNA, 764 bp, Arabidopsis thaliana; identical to SEQ ID NO: 104745
  misc_feature (1)..(764): Ceres Seq. ID no. 13615675
  misc_feature (1)..(764): Ortholog of  Ceres SEQ ID NO 13582188 as cited in SEQ ID NO 55950
  misc_feature (1)..(764): Ortholog of  Ceres SEQ ID NO 12611286 as cited in SEQ ID NO 56182
  misc_feature (1)..(764): Ortholog of  Ceres SEQ ID NO 15173288 as cited in SEQ ID NO 58150
  misc_feature (1)..(764): Ortholog of  Ceres SEQ ID NO 13663461 as cited in SEQ ID NO 66601

SEQ ID NO: 115985 - protein, 161 aa, Arabidopsis thaliana; identical to SEQ ID NO: 104746
  peptide (1)..(161): Ceres Seq. ID no. 13615676

SEQ ID NO: 115986 - protein, 93 aa, Arabidopsis thaliana; identical to SEQ ID NO: 29147
  peptide (1)..(93): Ceres Seq. ID no. 13615677

SEQ ID NO: 115987 - DNA, 842 bp, Arabidopsis thaliana; identical to SEQ ID NO: 104748
  misc_feature (1)..(842): Ceres Seq. ID no. 13615678
  misc_feature (1)..(842): Ortholog of  Ceres SEQ ID NO 14306406 as cited in SEQ ID NO 1412
  misc_feature (1)..(842): Ortholog of  Ceres SEQ ID NO 14309488 as cited in SEQ ID NO 52755
  misc_feature (1)..(842): Ortholog of  Ceres SEQ ID NO 15178824 as cited in SEQ ID NO 0

SEQ ID NO: 115988 - protein, 185 aa, Arabidopsis thaliana; identical to SEQ ID NO: 22151
  peptide (1)..(185): Ceres Seq. ID no. 13615679

SEQ ID NO: 115989 - protein, 165 aa, Arabidopsis thaliana; identical to SEQ ID NO: 104750
  peptide (1)..(165): Ceres Seq. ID no. 13615680

SEQ ID NO: 115990 - protein, 158 aa, Arabidopsis thaliana; identical to SEQ ID NO: 104751
  peptide (1)..(158): Ceres Seq. ID no. 13615681

SEQ ID NO: 115991 - DNA, 1160 bp, Arabidopsis thaliana; identical to SEQ ID NO: 104752
  misc_feature (1)..(1160): Ceres Seq. ID no. 13615682
  misc_feature (1)..(1160): Ortholog of  Ceres SEQ ID NO 14308401 as cited in SEQ ID NO 55082

SEQ ID NO: 115992 - protein, 326 aa, Arabidopsis thaliana; identical to SEQ ID NO: 41461
  peptide (1)..(326): Ceres Seq. ID no. 13615683

SEQ ID NO: 115993 - protein, 311 aa, Arabidopsis thaliana; identical to SEQ ID NO: 41462
  peptide (1)..(311): Ceres Seq. ID no. 13615684

SEQ ID NO: 115994 - protein, 302 aa, Arabidopsis thaliana; identical to SEQ ID NO: 41463
  peptide (1)..(302): Ceres Seq. ID no. 13615685

SEQ ID NO: 115995 - DNA, 992 bp, Arabidopsis thaliana; identical to SEQ ID NO: 104756
  misc_feature (1)..(992): Ceres Seq. ID no. 13615686
  misc_feature (1)..(992): Ortholog of  Ceres SEQ ID NO 12627215 as cited in SEQ ID NO 60976
  misc_feature (1)..(992): Ortholog of  Ceres SEQ ID NO 12589584 as cited in SEQ ID NO 0
  misc_feature (1)..(992): Ortholog of  Ceres SEQ ID NO 12635657 as cited in SEQ ID NO 0
  misc_feature (1)..(992): Ortholog of  Ceres SEQ ID NO 12635879 as cited in SEQ ID NO 0
  misc_feature (1)..(992): Ortholog of  Ceres SEQ ID NO 13599649 as cited in SEQ ID NO 0
  misc_feature (1)..(992): Ortholog of  Ceres SEQ ID NO 14309404 as cited in SEQ ID NO 0

SEQ ID NO: 115996 - protein, 259 aa, Arabidopsis thaliana; identical to SEQ ID NO: 25778
  peptide (1)..(259): Ceres Seq. ID no. 13615687

SEQ ID NO: 115997 - protein, 254 aa, Arabidopsis thaliana; identical to SEQ ID NO: 25779
  peptide (1)..(254): Ceres Seq. ID no. 13615688

SEQ ID NO: 115998 - DNA, 1162 bp, Arabidopsis thaliana; identical to SEQ ID NO: 104759
  misc_feature (1)..(1162): Ceres Seq. ID no. 13615699
  misc_feature (1)..(1162): Ortholog of  Ceres SEQ ID NO 12609770 as cited in SEQ ID NO 51477
  misc_feature (1)..(1162): Ortholog of  Ceres SEQ ID NO 15177764 as cited in SEQ ID NO 57561

SEQ ID NO: 115999 - protein, 258 aa, Arabidopsis thaliana; identical to SEQ ID NO: 35738
  peptide (1)..(258): Ceres Seq. ID no. 13615700

SEQ ID NO: 116000 - protein, 242 aa, Arabidopsis thaliana; identical to SEQ ID NO: 35739
  peptide (1)..(242): Ceres Seq. ID no. 13615701

SEQ ID NO: 116001 - protein, 131 aa, Arabidopsis thaliana; identical to SEQ ID NO: 35740
  peptide (1)..(131): Ceres Seq. ID no. 13615702

SEQ ID NO: 116002 - DNA, 2060 bp, Arabidopsis thaliana; identical to SEQ ID NO: 104763
  misc_feature (1)..(2060): Ceres Seq. ID no. 13615703
  misc_feature (1)..(2060): Ortholog of  Ceres SEQ ID NO 15177463 as cited in SEQ ID NO 0

SEQ ID NO: 116003 - protein, 595 aa, Arabidopsis thaliana; identical to SEQ ID NO: 104764
  peptide (1)..(595): Ceres Seq. ID no. 13615704

SEQ ID NO: 116004 - protein, 438 aa, Arabidopsis thaliana; identical to SEQ ID NO: 104765
  peptide (1)..(438): Ceres Seq. ID no. 13615705

SEQ ID NO: 116005 - protein, 434 aa, Arabidopsis thaliana; identical to SEQ ID NO: 104766
  peptide (1)..(434): Ceres Seq. ID no. 13615706

SEQ ID NO: 116006 - DNA, 1092 bp, Arabidopsis thaliana; identical to SEQ ID NO: 104767
  misc_feature (1)..(1092): Ceres Seq. ID no. 13615707
  misc_feature (1)..(1092): Ortholog of  Ceres SEQ ID NO 12609965 as cited in SEQ ID NO 55883
  misc_feature (1)..(1092): Ortholog of  Ceres SEQ ID NO 13596393 as cited in SEQ ID NO 62144
  misc_feature (1)..(1092): Ortholog of  Ceres SEQ ID NO 13591076 as cited in SEQ ID NO 63757
  misc_feature (1)..(1092): Ortholog of  Ceres SEQ ID NO 13599575 as cited in SEQ ID NO 0

SEQ ID NO: 116007 - protein, 272 aa, Arabidopsis thaliana; identical to SEQ ID NO: 26036
  peptide (1)..(272): Ceres Seq. ID no. 13615708

SEQ ID NO: 116008 - DNA, 1298 bp, Arabidopsis thaliana; identical to SEQ ID NO: 104769
  misc_feature (1)..(1298): Ceres Seq. ID no. 13615709
  misc_feature (1)..(1298): Ortholog of  Ceres SEQ ID NO 12609965 as cited in SEQ ID NO 55883
  misc_feature (1)..(1298): Ortholog of  Ceres SEQ ID NO 13596393 as cited in SEQ ID NO 62144
  misc_feature (1)..(1298): Ortholog of  Ceres SEQ ID NO 13591076 as cited in SEQ ID NO 63757
  misc_feature (1)..(1298): Ortholog of  Ceres SEQ ID NO 13599575 as cited in SEQ ID NO 0

SEQ ID NO: 116009 - protein, 274 aa, Arabidopsis thaliana; identical to SEQ ID NO: 38962
  peptide (1)..(274): Ceres Seq. ID no. 13615710

SEQ ID NO: 116010 - DNA, 1251 bp, Arabidopsis thaliana; identical to SEQ ID NO: 104771
  misc_feature (1)..(1251): Ceres Seq. ID no. 13615715
  misc_feature (1)..(1251): Ortholog of  Ceres SEQ ID NO 13595351 as cited in SEQ ID NO 55934
  misc_feature (1)..(1251): Ortholog of  Ceres SEQ ID NO 13639645 as cited in SEQ ID NO 57488

SEQ ID NO: 116011 - protein, 377 aa, Arabidopsis thaliana; identical to SEQ ID NO: 39551
  peptide (1)..(377): Ceres Seq. ID no. 13615716

SEQ ID NO: 116012 - protein, 356 aa, Arabidopsis thaliana; identical to SEQ ID NO: 39552
  peptide (1)..(356): Ceres Seq. ID no. 13615717

SEQ ID NO: 116013 - protein, 344 aa, Arabidopsis thaliana; identical to SEQ ID NO: 39553
  peptide (1)..(344): Ceres Seq. ID no. 13615718

SEQ ID NO: 116014 - DNA, 1270 bp, Arabidopsis thaliana; identical to SEQ ID NO: 104775
  misc_feature (1)..(1270): Ceres Seq. ID no. 13615719
  misc_feature (1)..(1270): Ortholog of  Ceres SEQ ID NO 13495070 as cited in SEQ ID NO 53216
  misc_feature (1)..(1270): Ortholog of  Ceres SEQ ID NO 13656228 as cited in SEQ ID NO 65648
  misc_feature (1)..(1270): Ortholog of  Ceres SEQ ID NO 15176717 as cited in SEQ ID NO 0
  misc_feature (1)..(1270): Ortholog of  Ceres SEQ ID NO 15179618 as cited in SEQ ID NO 0

SEQ ID NO: 116015 - protein, 378 aa, Arabidopsis thaliana; identical to SEQ ID NO: 104776
  peptide (1)..(378): Ceres Seq. ID no. 13615720

SEQ ID NO: 116016 - protein, 336 aa, Arabidopsis thaliana; identical to SEQ ID NO: 26651
  peptide (1)..(336): Ceres Seq. ID no. 13615721

SEQ ID NO: 116017 - protein, 293 aa, Arabidopsis thaliana; identical to SEQ ID NO: 26652
  peptide (1)..(293): Ceres Seq. ID no. 13615722

SEQ ID NO: 116018 - DNA, 1656 bp, Arabidopsis thaliana; identical to SEQ ID NO: 104779
  misc_feature (1)..(1656): Ceres Seq. ID no. 13615723
  misc_feature (1)..(1656): Ortholog of  Ceres SEQ ID NO 15169511 as cited in SEQ ID NO 65927

SEQ ID NO: 116019 - protein, 484 aa, Arabidopsis thaliana; identical to SEQ ID NO: 77954
  peptide (1)..(484): Ceres Seq. ID no. 13615724

SEQ ID NO: 116020 - protein, 320 aa, Arabidopsis thaliana; identical to SEQ ID NO: 77955
  peptide (1)..(320): Ceres Seq. ID no. 13615725

SEQ ID NO: 116021 - DNA, 1534 bp, Arabidopsis thaliana; identical to SEQ ID NO: 104782
  misc_feature (1)..(1534): Ceres Seq. ID no. 13615726
  misc_feature (1)..(1534): Ortholog of  Ceres SEQ ID NO 14306565 as cited in SEQ ID NO 53000
  misc_feature (1)..(1534): Ortholog of  Ceres SEQ ID NO 14312192 as cited in SEQ ID NO 59249

SEQ ID NO: 116022 - protein, 274 aa, Arabidopsis thaliana; identical to SEQ ID NO: 40766
  peptide (1)..(274): Ceres Seq. ID no. 13615727

SEQ ID NO: 116023 - protein, 210 aa, Arabidopsis thaliana; identical to SEQ ID NO: 40767
  peptide (1)..(210): Ceres Seq. ID no. 13615728

SEQ ID NO: 116024 - DNA, 1535 bp, Arabidopsis thaliana; identical to SEQ ID NO: 104785
  misc_feature (1)..(1535): Ceres Seq. ID no. 13615742
  misc_feature (1)..(1535): Ortholog of  Ceres SEQ ID NO 14308437 as cited in SEQ ID NO 55577

SEQ ID NO: 116025 - protein, 429 aa, Arabidopsis thaliana; identical to SEQ ID NO: 41473
  peptide (1)..(429): Ceres Seq. ID no. 13615743

SEQ ID NO: 116026 - protein, 241 aa, Arabidopsis thaliana; identical to SEQ ID NO: 41474
  peptide (1)..(241): Ceres Seq. ID no. 13615744

SEQ ID NO: 116027 - protein, 218 aa, Arabidopsis thaliana; identical to SEQ ID NO: 41475
  peptide (1)..(218): Ceres Seq. ID no. 13615745

SEQ ID NO: 116028 - DNA, 1888 bp, Arabidopsis thaliana; identical to SEQ ID NO: 104789
  misc_feature (1)..(1888): Ceres Seq. ID no. 13615746
  misc_feature (1)..(1888): Ortholog of  Ceres SEQ ID NO 15168464 as cited in SEQ ID NO 59187
  misc_feature (1)..(1888): Ortholog of  Ceres SEQ ID NO 15171618 as cited in SEQ ID NO 59968

SEQ ID NO: 116029 - protein, 531 aa, Arabidopsis thaliana; identical to SEQ ID NO: 104790
  peptide (1)..(531): Ceres Seq. ID no. 13615747

SEQ ID NO: 116030 - protein, 489 aa, Arabidopsis thaliana; identical to SEQ ID NO: 104791
  peptide (1)..(489): Ceres Seq. ID no. 13615748

SEQ ID NO: 116031 - protein, 463 aa, Arabidopsis thaliana; identical to SEQ ID NO: 104792
  peptide (1)..(463): Ceres Seq. ID no. 13615749

SEQ ID NO: 116032 - DNA, 1516 bp, Arabidopsis thaliana; identical to SEQ ID NO: 104793
  misc_feature (1)..(1516): Ceres Seq. ID no. 13615750
  misc_feature (1)..(1516): Ortholog of  Ceres SEQ ID NO 14307404 as cited in SEQ ID NO 54231
  misc_feature (1)..(1516): Ortholog of  Ceres SEQ ID NO 14315052 as cited in SEQ ID NO 56951

SEQ ID NO: 116033 - protein, 386 aa, Arabidopsis thaliana; identical to SEQ ID NO: 22450
  peptide (1)..(386): Ceres Seq. ID no. 13615751

SEQ ID NO: 116034 - protein, 217 aa, Arabidopsis thaliana; identical to SEQ ID NO: 22451
  peptide (1)..(217): Ceres Seq. ID no. 13615752

SEQ ID NO: 116035 - DNA, 1156 bp, Arabidopsis thaliana; identical to SEQ ID NO: 104796
  misc_feature (1)..(1156): Ceres Seq. ID no. 13615753
  misc_feature (1)..(1156): Ortholog of  Ceres SEQ ID NO 12616093 as cited in SEQ ID NO 63331

SEQ ID NO: 116036 - protein, 332 aa, Arabidopsis thaliana; identical to SEQ ID NO: 22434
  peptide (1)..(332): Ceres Seq. ID no. 13615754

SEQ ID NO: 116037 - protein, 300 aa, Arabidopsis thaliana; identical to SEQ ID NO: 22435
  peptide (1)..(300): Ceres Seq. ID no. 13615755

SEQ ID NO: 116038 - protein, 182 aa, Arabidopsis thaliana; identical to SEQ ID NO: 22436
  peptide (1)..(182): Ceres Seq. ID no. 13615756

SEQ ID NO: 116039 - DNA, 2424 bp, Arabidopsis thaliana; identical to SEQ ID NO: 104800
  misc_feature (1)..(2424): Ceres Seq. ID no. 13615757
  misc_feature (1)..(2424): Ortholog of  Ceres SEQ ID NO 15173102 as cited in SEQ ID NO 61106

SEQ ID NO: 116040 - protein, 785 aa, Arabidopsis thaliana; identical to SEQ ID NO: 42028
  peptide (1)..(785): Ceres Seq. ID no. 13615758

SEQ ID NO: 116041 - protein, 773 aa, Arabidopsis thaliana; identical to SEQ ID NO: 42029
  peptide (1)..(773): Ceres Seq. ID no. 13615759

SEQ ID NO: 116042 - protein, 625 aa, Arabidopsis thaliana; identical to SEQ ID NO: 42030
  peptide (1)..(625): Ceres Seq. ID no. 13615760

SEQ ID NO: 116043 - DNA, 1148 bp, Arabidopsis thaliana; identical to SEQ ID NO: 104804
  misc_feature (1)..(1148): Ceres Seq. ID no. 13615784
  misc_feature (1)..(1148): Ortholog of  Ceres SEQ ID NO 13594560 as cited in SEQ ID NO 51329
  misc_feature (1)..(1148): Ortholog of  Ceres SEQ ID NO 12613701 as cited in SEQ ID NO 67983

SEQ ID NO: 116044 - protein, 296 aa, Arabidopsis thaliana; identical to SEQ ID NO: 104805
  peptide (1)..(296): Ceres Seq. ID no. 13615785

SEQ ID NO: 116045 - protein, 176 aa, Arabidopsis thaliana; identical to SEQ ID NO: 25297
  peptide (1)..(176): Ceres Seq. ID no. 13615786

SEQ ID NO: 116046 - protein, 151 aa, Arabidopsis thaliana; identical to SEQ ID NO: 25298
  peptide (1)..(151): Ceres Seq. ID no. 13615787

SEQ ID NO: 116047 - DNA, 2146 bp, Arabidopsis thaliana; identical to SEQ ID NO: 104808
  misc_feature (1)..(2146): Ceres Seq. ID no. 13615788
  misc_feature (1)..(2146): Ortholog of  Ceres SEQ ID NO 12613725 as cited in SEQ ID NO 68196

SEQ ID NO: 116048 - protein, 589 aa, Arabidopsis thaliana; identical to SEQ ID NO: 104809
  peptide (1)..(589): Ceres Seq. ID no. 13615789

SEQ ID NO: 116049 - protein, 526 aa, Arabidopsis thaliana; identical to SEQ ID NO: 69606
  peptide (1)..(526): Ceres Seq. ID no. 13615790

SEQ ID NO: 116050 - protein, 475 aa, Arabidopsis thaliana; identical to SEQ ID NO: 69607
  peptide (1)..(475): Ceres Seq. ID no. 13615791

SEQ ID NO: 116051 - DNA, 1403 bp, Arabidopsis thaliana; identical to SEQ ID NO: 104812
  misc_feature (1)..(1403): Ceres Seq. ID no. 13615796
  misc_feature (1)..(1403): Ortholog of  Ceres SEQ ID NO 14302314 as cited in SEQ ID NO 62543
  misc_feature (1)..(1403): Ortholog of  Ceres SEQ ID NO 13598391 as cited in SEQ ID NO 62769

SEQ ID NO: 116052 - protein, 291 aa, Arabidopsis thaliana; identical to SEQ ID NO: 20955
  peptide (1)..(291): Ceres Seq. ID no. 13615797

SEQ ID NO: 116053 - protein, 285 aa, Arabidopsis thaliana; identical to SEQ ID NO: 20956
  peptide (1)..(285): Ceres Seq. ID no. 13615798

SEQ ID NO: 116054 - protein, 284 aa, Arabidopsis thaliana; identical to SEQ ID NO: 20957
  peptide (1)..(284): Ceres Seq. ID no. 13615799

SEQ ID NO: 116055 - DNA, 1937 bp, Arabidopsis thaliana; identical to SEQ ID NO: 104816
  misc_feature (1)..(1937): Ceres Seq. ID no. 13615807
  misc_feature (1)..(1937): Ortholog of  Ceres SEQ ID NO 15176081 as cited in SEQ ID NO 65838
  misc_feature (1)..(1937): Ortholog of  Ceres SEQ ID NO 13660287 as cited in SEQ ID NO 67316

SEQ ID NO: 116056 - protein, 507 aa, Arabidopsis thaliana; identical to SEQ ID NO: 77565
  peptide (1)..(507): Ceres Seq. ID no. 13615808

SEQ ID NO: 116057 - protein, 432 aa, Arabidopsis thaliana; identical to SEQ ID NO: 30285
  peptide (1)..(432): Ceres Seq. ID no. 13615809

SEQ ID NO: 116058 - protein, 399 aa, Arabidopsis thaliana; identical to SEQ ID NO: 30286
  peptide (1)..(399): Ceres Seq. ID no. 13615810

SEQ ID NO: 116059 - DNA, 690 bp, Arabidopsis thaliana; identical to SEQ ID NO: 104820
  misc_feature (1)..(690): Ceres Seq. ID no. 13615818
  misc_feature (1)..(690): Ortholog of  Ceres SEQ ID NO 13638466 as cited in SEQ ID NO 58311

SEQ ID NO: 116060 - protein, 130 aa, Arabidopsis thaliana; identical to SEQ ID NO: 34957
  peptide (1)..(130): Ceres Seq. ID no. 13615819

SEQ ID NO: 116061 - protein, 90 aa, Arabidopsis thaliana; identical to SEQ ID NO: 34958
  peptide (1)..(90): Ceres Seq. ID no. 13615820

SEQ ID NO: 116062 - protein, 75 aa, Arabidopsis thaliana; identical to SEQ ID NO: 34959
  peptide (1)..(75): Ceres Seq. ID no. 13615821

SEQ ID NO: 116063 - DNA, 1391 bp, Arabidopsis thaliana; identical to SEQ ID NO: 104824
  misc_feature (1)..(1391): Ceres Seq. ID no. 13615822
  misc_feature (1)..(1391): Ortholog of  Ceres SEQ ID NO 13596581 as cited in SEQ ID NO 62420
  misc_feature (1)..(1391): Ortholog of  Ceres SEQ ID NO 13591273 as cited in SEQ ID NO 65904
  misc_feature (1)..(1391): Ortholog of  Ceres SEQ ID NO 13623086 as cited in SEQ ID NO 0

SEQ ID NO: 116064 - protein, 389 aa, Arabidopsis thaliana; identical to SEQ ID NO: 104825
  peptide (1)..(389): Ceres Seq. ID no. 13615823

SEQ ID NO: 116065 - protein, 384 aa, Arabidopsis thaliana; identical to SEQ ID NO: 104826
  peptide (1)..(384): Ceres Seq. ID no. 13615824

SEQ ID NO: 116066 - protein, 253 aa, Arabidopsis thaliana; identical to SEQ ID NO: 104827
  peptide (1)..(253): Ceres Seq. ID no. 13615825

SEQ ID NO: 116067 - DNA, 1269 bp, Arabidopsis thaliana; identical to SEQ ID NO: 104828
  misc_feature (1)..(1269): Ceres Seq. ID no. 13615826
  misc_feature (1)..(1269): Ortholog of  Ceres SEQ ID NO 14302396 as cited in SEQ ID NO 66907
  misc_feature (1)..(1269): Ortholog of  Ceres SEQ ID NO 13496281 as cited in SEQ ID NO 69175

SEQ ID NO: 116068 - protein, 224 aa, Arabidopsis thaliana; identical to SEQ ID NO: 37749
  peptide (1)..(224): Ceres Seq. ID no. 13615827

SEQ ID NO: 116069 - protein, 186 aa, Arabidopsis thaliana; identical to SEQ ID NO: 23851
  peptide (1)..(186): Ceres Seq. ID no. 13615828

SEQ ID NO: 116070 - DNA, 1632 bp, Arabidopsis thaliana; identical to SEQ ID NO: 104831
  misc_feature (1)..(1632): Ceres Seq. ID no. 13615841
  misc_feature (1)..(1632): Ortholog of  Ceres SEQ ID NO 14313491 as cited in SEQ ID NO 0

SEQ ID NO: 116071 - protein, 380 aa, Arabidopsis thaliana; identical to SEQ ID NO: 104832
  peptide (1)..(380): Ceres Seq. ID no. 13615842

SEQ ID NO: 116072 - DNA, 1775 bp, Arabidopsis thaliana; identical to SEQ ID NO: 104833
  misc_feature (1)..(1775): Ceres Seq. ID no. 13615859
  misc_feature (1)..(1775): Ortholog of  Ceres SEQ ID NO 12611314 as cited in SEQ ID NO 56535
  misc_feature (1)..(1775): Ortholog of  Ceres SEQ ID NO 15178046 as cited in SEQ ID NO 60380
  misc_feature (1)..(1775): Ortholog of  Ceres SEQ ID NO 14312016 as cited in SEQ ID NO 60412
  misc_feature (1)..(1775): Ortholog of  Ceres SEQ ID NO 13661438 as cited in SEQ ID NO 61414

SEQ ID NO: 116073 - protein, 389 aa, Arabidopsis thaliana; identical to SEQ ID NO: 104834
  peptide (1)..(389): Ceres Seq. ID no. 13615860

SEQ ID NO: 116074 - protein, 384 aa, Arabidopsis thaliana; identical to SEQ ID NO: 104835
  peptide (1)..(384): Ceres Seq. ID no. 13615861

SEQ ID NO: 116075 - protein, 341 aa, Arabidopsis thaliana; identical to SEQ ID NO: 104836
  peptide (1)..(341): Ceres Seq. ID no. 13615862

SEQ ID NO: 116076 - DNA, 1396 bp, Arabidopsis thaliana; identical to SEQ ID NO: 104837
  misc_feature (1)..(1396): Ceres Seq. ID no. 13615863
  misc_feature (1)..(1396): Ortholog of  Ceres SEQ ID NO 13598368 as cited in SEQ ID NO 62140

SEQ ID NO: 116077 - protein, 436 aa, Arabidopsis thaliana; identical to SEQ ID NO: 104838
  peptide (1)..(436): Ceres Seq. ID no. 13615864

SEQ ID NO: 116078 - protein, 428 aa, Arabidopsis thaliana; identical to SEQ ID NO: 104839
  peptide (1)..(428): Ceres Seq. ID no. 13615865

SEQ ID NO: 116079 - protein, 419 aa, Arabidopsis thaliana; identical to SEQ ID NO: 69667
  peptide (1)..(419): Ceres Seq. ID no. 13615866

SEQ ID NO: 116080 - DNA, 518 bp, Arabidopsis thaliana; identical to SEQ ID NO: 104841
  misc_feature (1)..(518): Ceres Seq. ID no. 13615867
  misc_feature (1)..(518): Ortholog of  Ceres SEQ ID NO 15170497 as cited in SEQ ID NO 52766

SEQ ID NO: 116081 - protein, 169 aa, Arabidopsis thaliana; identical to SEQ ID NO: 104842
  peptide (1)..(169): Ceres Seq. ID no. 13615868

SEQ ID NO: 116082 - protein, 142 aa, Arabidopsis thaliana; identical to SEQ ID NO: 104843
  peptide (1)..(142): Ceres Seq. ID no. 13615869

SEQ ID NO: 116083 - protein, 137 aa, Arabidopsis thaliana; identical to SEQ ID NO: 104844
  peptide (1)..(137): Ceres Seq. ID no. 13615870

SEQ ID NO: 116084 - DNA, 3109 bp, Arabidopsis thaliana; identical to SEQ ID NO: 104845
  misc_feature (1)..(3109): Ceres Seq. ID no. 13615875
  misc_feature (1)..(3109): Ortholog of  Ceres SEQ ID NO 13658778 as cited in SEQ ID NO 66511

SEQ ID NO: 116085 - protein, 985 aa, Arabidopsis thaliana; identical to SEQ ID NO: 24485
  peptide (1)..(985): Ceres Seq. ID no. 13615876

SEQ ID NO: 116086 - protein, 984 aa, Arabidopsis thaliana; identical to SEQ ID NO: 24486
  peptide (1)..(984): Ceres Seq. ID no. 13615877

SEQ ID NO: 116087 - protein, 832 aa, Arabidopsis thaliana; identical to SEQ ID NO: 24487
  peptide (1)..(832): Ceres Seq. ID no. 13615878

SEQ ID NO: 116088 - DNA, 897 bp, Arabidopsis thaliana; identical to SEQ ID NO: 104849
  misc_feature (1)..(897): Ceres Seq. ID no. 13615883
  misc_feature (1)..(897): Ortholog of  Ceres SEQ ID NO 14306264 as cited in SEQ ID NO 1386
  misc_feature (1)..(897): Ortholog of  Ceres SEQ ID NO 15179159 as cited in SEQ ID NO 0

SEQ ID NO: 116089 - protein, 256 aa, Arabidopsis thaliana; identical to SEQ ID NO: 104850
  peptide (1)..(256): Ceres Seq. ID no. 13615884

SEQ ID NO: 116090 - protein, 247 aa, Arabidopsis thaliana; identical to SEQ ID NO: 104851
  peptide (1)..(247): Ceres Seq. ID no. 13615885

SEQ ID NO: 116091 - protein, 226 aa, Arabidopsis thaliana; identical to SEQ ID NO: 104852
  peptide (1)..(226): Ceres Seq. ID no. 13615886

SEQ ID NO: 116092 - DNA, 1938 bp, Arabidopsis thaliana; identical to SEQ ID NO: 104853
  misc_feature (1)..(1938): Ceres Seq. ID no. 13615887
  misc_feature (1)..(1938): Ortholog of  Ceres SEQ ID NO 15176822 as cited in SEQ ID NO 1160
  misc_feature (1)..(1938): Ortholog of  Ceres SEQ ID NO 13593889 as cited in SEQ ID NO 53305
  misc_feature (1)..(1938): Ortholog of  Ceres SEQ ID NO 13581959 as cited in SEQ ID NO 56156

SEQ ID NO: 116093 - protein, 459 aa, Arabidopsis thaliana; identical to SEQ ID NO: 24622
  peptide (1)..(459): Ceres Seq. ID no. 13615888

SEQ ID NO: 116094 - protein, 442 aa, Arabidopsis thaliana; identical to SEQ ID NO: 24623
  peptide (1)..(442): Ceres Seq. ID no. 13615889

SEQ ID NO: 116095 - protein, 412 aa, Arabidopsis thaliana; identical to SEQ ID NO: 24624
  peptide (1)..(412): Ceres Seq. ID no. 13615890

SEQ ID NO: 116096 - DNA, 945 bp, Arabidopsis thaliana; identical to SEQ ID NO: 104857
  misc_feature (1)..(945): Ceres Seq. ID no. 13615893
  misc_feature (1)..(945): Ortholog of  Ceres SEQ ID NO 13598140 as cited in SEQ ID NO 61443

SEQ ID NO: 116097 - protein, 215 aa, Arabidopsis thaliana; identical to SEQ ID NO: 104858
  peptide (1)..(215): Ceres Seq. ID no. 13615894

SEQ ID NO: 116098 - protein, 129 aa, Arabidopsis thaliana; identical to SEQ ID NO: 104859
  peptide (1)..(129): Ceres Seq. ID no. 13615895

SEQ ID NO: 116099 - DNA, 1212 bp, Arabidopsis thaliana; identical to SEQ ID NO: 104860
  misc_feature (1)..(1212): Ceres Seq. ID no. 13615914
  misc_feature (1)..(1212): Ortholog of  Ceres SEQ ID NO 14303355 as cited in SEQ ID NO 59746
  misc_feature (1)..(1212): Ortholog of  Ceres SEQ ID NO 14302415 as cited in SEQ ID NO 62781

SEQ ID NO: 116100 - protein, 317 aa, Arabidopsis thaliana; identical to SEQ ID NO: 104861
  peptide (1)..(317): Ceres Seq. ID no. 13615915

SEQ ID NO: 116101 - protein, 269 aa, Arabidopsis thaliana; identical to SEQ ID NO: 104862
  peptide (1)..(269): Ceres Seq. ID no. 13615916

SEQ ID NO: 116102 - protein, 242 aa, Arabidopsis thaliana; identical to SEQ ID NO: 36749
  peptide (1)..(242): Ceres Seq. ID no. 13615917

SEQ ID NO: 116103 - DNA, 1546 bp, Arabidopsis thaliana; identical to SEQ ID NO: 104864
  misc_feature (1)..(1546): Ceres Seq. ID no. 13615918
  misc_feature (1)..(1546): Ortholog of  Ceres SEQ ID NO 13582297 as cited in SEQ ID NO 56486
  misc_feature (1)..(1546): Ortholog of  Ceres SEQ ID NO 13586936 as cited in SEQ ID NO 0

SEQ ID NO: 116104 - protein, 359 aa, Arabidopsis thaliana; identical to SEQ ID NO: 38897
  peptide (1)..(359): Ceres Seq. ID no. 13615919

SEQ ID NO: 116105 - protein, 358 aa, Arabidopsis thaliana; identical to SEQ ID NO: 38898
  peptide (1)..(358): Ceres Seq. ID no. 13615920

SEQ ID NO: 116106 - protein, 320 aa, Arabidopsis thaliana; identical to SEQ ID NO: 38899
  peptide (1)..(320): Ceres Seq. ID no. 13615921

SEQ ID NO: 116107 - DNA, 1274 bp, Arabidopsis thaliana; identical to SEQ ID NO: 104868
  misc_feature (1)..(1274): Ceres Seq. ID no. 13615922
  misc_feature (1)..(1274): Ortholog of  Ceres SEQ ID NO 14308571 as cited in SEQ ID NO 58921

SEQ ID NO: 116108 - protein, 300 aa, Arabidopsis thaliana; identical to SEQ ID NO: 43198
  peptide (1)..(300): Ceres Seq. ID no. 13615923

SEQ ID NO: 116109 - protein, 254 aa, Arabidopsis thaliana; identical to SEQ ID NO: 43199
  peptide (1)..(254): Ceres Seq. ID no. 13615924

SEQ ID NO: 116110 - protein, 197 aa, Arabidopsis thaliana; identical to SEQ ID NO: 43200
  peptide (1)..(197): Ceres Seq. ID no. 13615925

SEQ ID NO: 116111 - DNA, 1655 bp, Arabidopsis thaliana; identical to SEQ ID NO: 104872
  misc_feature (1)..(1655): Ceres Seq. ID no. 13615946
  misc_feature (1)..(1655): Ortholog of  Ceres SEQ ID NO 14311553 as cited in SEQ ID NO 51462
  misc_feature (1)..(1655): Ortholog of  Ceres SEQ ID NO 13599003 as cited in SEQ ID NO 0

SEQ ID NO: 116112 - protein, 397 aa, Arabidopsis thaliana; identical to SEQ ID NO: 104873
  peptide (1)..(397): Ceres Seq. ID no. 13615947

SEQ ID NO: 116113 - protein, 386 aa, Arabidopsis thaliana; identical to SEQ ID NO: 104874
  peptide (1)..(386): Ceres Seq. ID no. 13615948

SEQ ID NO: 116114 - protein, 373 aa, Arabidopsis thaliana; identical to SEQ ID NO: 104875
  peptide (1)..(373): Ceres Seq. ID no. 13615949

SEQ ID NO: 116115 - DNA, 1281 bp, Arabidopsis thaliana; identical to SEQ ID NO: 104876
  misc_feature (1)..(1281): Ceres Seq. ID no. 13615969
  misc_feature (1)..(1281): Ortholog of  Ceres SEQ ID NO 12609146 as cited in SEQ ID NO 52118
  misc_feature (1)..(1281): Ortholog of  Ceres SEQ ID NO 14303397 as cited in SEQ ID NO 54614
  misc_feature (1)..(1281): Ortholog of  Ceres SEQ ID NO 13594056 as cited in SEQ ID NO 55691
  misc_feature (1)..(1281): Ortholog of  Ceres SEQ ID NO 14314186 as cited in SEQ ID NO 57457
  misc_feature (1)..(1281): Ortholog of  Ceres SEQ ID NO 13638136 as cited in SEQ ID NO 58644
  misc_feature (1)..(1281): Ortholog of  Ceres SEQ ID NO 13596868 as cited in SEQ ID NO 62806
  misc_feature (1)..(1281): Ortholog of  Ceres SEQ ID NO 12587035 as cited in SEQ ID NO 63605
  misc_feature (1)..(1281): Ortholog of  Ceres SEQ ID NO 13595885 as cited in SEQ ID NO 69265
  misc_feature (1)..(1281): Ortholog of  Ceres SEQ ID NO 12566239 as cited in SEQ ID NO 0
  misc_feature (1)..(1281): Ortholog of  Ceres SEQ ID NO 13599119 as cited in SEQ ID NO 0
  misc_feature (1)..(1281): Ortholog of  Ceres SEQ ID NO 14308987 as cited in SEQ ID NO 0

SEQ ID NO: 116116 - protein, 279 aa, Arabidopsis thaliana; identical to SEQ ID NO: 35269
  peptide (1)..(279): Ceres Seq. ID no. 13615970

SEQ ID NO: 116117 - protein, 270 aa, Arabidopsis thaliana; identical to SEQ ID NO: 35270
  peptide (1)..(270): Ceres Seq. ID no. 13615971

SEQ ID NO: 116118 - protein, 235 aa, Arabidopsis thaliana; identical to SEQ ID NO: 35271
  peptide (1)..(235): Ceres Seq. ID no. 13615972

SEQ ID NO: 116119 - DNA, 1147 bp, Arabidopsis thaliana; identical to SEQ ID NO: 104880
  misc_feature (1)..(1147): Ceres Seq. ID no. 13615977
  misc_feature (1)..(1147): Ortholog of  Ceres SEQ ID NO 12593170 as cited in SEQ ID NO 63263
  misc_feature (1)..(1147): Ortholog of  Ceres SEQ ID NO 14301882 as cited in SEQ ID NO 64381
  misc_feature (1)..(1147): Ortholog of  Ceres SEQ ID NO 13597851 as cited in SEQ ID NO 64869
  misc_feature (1)..(1147): Ortholog of  Ceres SEQ ID NO 13662420 as cited in SEQ ID NO 68680

SEQ ID NO: 116120 - protein, 310 aa, Arabidopsis thaliana; identical to SEQ ID NO: 104881
  peptide (1)..(310): Ceres Seq. ID no. 13615978

SEQ ID NO: 116121 - protein, 282 aa, Arabidopsis thaliana; identical to SEQ ID NO: 104882
  peptide (1)..(282): Ceres Seq. ID no. 13615979

SEQ ID NO: 116122 - protein, 239 aa, Arabidopsis thaliana; identical to SEQ ID NO: 104883
  peptide (1)..(239): Ceres Seq. ID no. 13615980

SEQ ID NO: 116123 - DNA, 1620 bp, Arabidopsis thaliana; identical to SEQ ID NO: 104884
  misc_feature (1)..(1620): Ceres Seq. ID no. 13615983
  misc_feature (1)..(1620): Ortholog of  Ceres SEQ ID NO 13596189 as cited in SEQ ID NO 68452

SEQ ID NO: 116124 - protein, 396 aa, Arabidopsis thaliana; identical to SEQ ID NO: 104885
  peptide (1)..(396): Ceres Seq. ID no. 13615984

SEQ ID NO: 116125 - protein, 385 aa, Arabidopsis thaliana; identical to SEQ ID NO: 104886
  peptide (1)..(385): Ceres Seq. ID no. 13615985

SEQ ID NO: 116126 - protein, 377 aa, Arabidopsis thaliana; identical to SEQ ID NO: 104887
  peptide (1)..(377): Ceres Seq. ID no. 13615986

SEQ ID NO: 116127 - DNA, 1285 bp, Arabidopsis thaliana; identical to SEQ ID NO: 104888
  misc_feature (1)..(1285): Ceres Seq. ID no. 13615990
  misc_feature (1)..(1285): Ortholog of  Ceres SEQ ID NO 15172958 as cited in SEQ ID NO 51206
  misc_feature (1)..(1285): Ortholog of  Ceres SEQ ID NO 15171139 as cited in SEQ ID NO 60093
  misc_feature (1)..(1285): Ortholog of  Ceres SEQ ID NO 12634262 as cited in SEQ ID NO 0

SEQ ID NO: 116128 - protein, 186 aa, Arabidopsis thaliana; identical to SEQ ID NO: 104889
  peptide (1)..(186): Ceres Seq. ID no. 13615991

SEQ ID NO: 116129 - DNA, 1603 bp, Arabidopsis thaliana; identical to SEQ ID NO: 104890
  misc_feature (1)..(1603): Ceres Seq. ID no. 13615992
  misc_feature (1)..(1603): Ortholog of  Ceres SEQ ID NO 13657677 as cited in SEQ ID NO 66119

SEQ ID NO: 116130 - protein, 473 aa, Arabidopsis thaliana; identical to SEQ ID NO: 104891
  peptide (1)..(473): Ceres Seq. ID no. 13615993

SEQ ID NO: 116131 - protein, 463 aa, Arabidopsis thaliana; identical to SEQ ID NO: 42925
  peptide (1)..(463): Ceres Seq. ID no. 13615994

SEQ ID NO: 116132 - protein, 453 aa, Arabidopsis thaliana; identical to SEQ ID NO: 42926
  peptide (1)..(453): Ceres Seq. ID no. 13615995

SEQ ID NO: 116133 - DNA, 883 bp, Arabidopsis thaliana; identical to SEQ ID NO: 104894
  misc_feature (1)..(883): Ceres Seq. ID no. 13615999
  misc_feature (1)..(883): Ortholog of  Ceres SEQ ID NO 12635883 as cited in SEQ ID NO 0

SEQ ID NO: 116134 - protein, 152 aa, Arabidopsis thaliana; identical to SEQ ID NO: 25888
  peptide (1)..(152): Ceres Seq. ID no. 13616000

SEQ ID NO: 116135 - protein, 150 aa, Arabidopsis thaliana; identical to SEQ ID NO: 25889
  peptide (1)..(150): Ceres Seq. ID no. 13616001

SEQ ID NO: 116136 - protein, 145 aa, Arabidopsis thaliana; identical to SEQ ID NO: 25890
  peptide (1)..(145): Ceres Seq. ID no. 13616002

SEQ ID NO: 116137 - DNA, 1003 bp, Arabidopsis thaliana; identical to SEQ ID NO: 104898
  misc_feature (1)..(1003): Ceres Seq. ID no. 13616003
  misc_feature (1)..(1003): Ortholog of  Ceres SEQ ID NO 12784064 as cited in SEQ ID NO 66982
  misc_feature (1)..(1003): Ortholog of  Ceres SEQ ID NO 15177907 as cited in SEQ ID NO 0

SEQ ID NO: 116138 - protein, 252 aa, Arabidopsis thaliana; identical to SEQ ID NO: 104899
  peptide (1)..(252): Ceres Seq. ID no. 13616004

SEQ ID NO: 116139 - protein, 241 aa, Arabidopsis thaliana; identical to SEQ ID NO: 22201
  peptide (1)..(241): Ceres Seq. ID no. 13616005

SEQ ID NO: 116140 - DNA, 1327 bp, Arabidopsis thaliana; identical to SEQ ID NO: 104901
  misc_feature (1)..(1327): Ceres Seq. ID no. 13616018
  misc_feature (1)..(1327): Ortholog of  Ceres SEQ ID NO 12635446 as cited in SEQ ID NO 0

SEQ ID NO: 116141 - protein, 361 aa, Arabidopsis thaliana; identical to SEQ ID NO: 104902
  peptide (1)..(361): Ceres Seq. ID no. 13616019

SEQ ID NO: 116142 - protein, 301 aa, Arabidopsis thaliana; identical to SEQ ID NO: 35707
  peptide (1)..(301): Ceres Seq. ID no. 13616020

SEQ ID NO: 116143 - protein, 299 aa, Arabidopsis thaliana; identical to SEQ ID NO: 35708
  peptide (1)..(299): Ceres Seq. ID no. 13616021

SEQ ID NO: 116144 - DNA, 967 bp, Arabidopsis thaliana; identical to SEQ ID NO: 104905
  misc_feature (1)..(967): Ceres Seq. ID no. 13616022
  misc_feature (1)..(967): Ortholog of  Ceres SEQ ID NO 13599581 as cited in SEQ ID NO 0

SEQ ID NO: 116145 - protein, 160 aa, Arabidopsis thaliana; identical to SEQ ID NO: 35361
  peptide (1)..(160): Ceres Seq. ID no. 13616023

SEQ ID NO: 116146 - DNA, 1099 bp, Arabidopsis thaliana; identical to SEQ ID NO: 104907
  misc_feature (1)..(1099): Ceres Seq. ID no. 13616036
  misc_feature (1)..(1099): Ortholog of  Ceres SEQ ID NO 15175591 as cited in SEQ ID NO 57544

SEQ ID NO: 116147 - protein, 268 aa, Arabidopsis thaliana; identical to SEQ ID NO: 104908
  peptide (1)..(268): Ceres Seq. ID no. 13616037

SEQ ID NO: 116148 - protein, 254 aa, Arabidopsis thaliana; identical to SEQ ID NO: 104909
  peptide (1)..(254): Ceres Seq. ID no. 13616038

SEQ ID NO: 116149 - DNA, 1697 bp, Arabidopsis thaliana; identical to SEQ ID NO: 104910
  misc_feature (1)..(1697): Ceres Seq. ID no. 13616041
  misc_feature (1)..(1697): Ortholog of  Ceres SEQ ID NO 12612314 as cited in SEQ ID NO 51420
  misc_feature (1)..(1697): Ortholog of  Ceres SEQ ID NO 14306493 as cited in SEQ ID NO 53170
  misc_feature (1)..(1697): Ortholog of  Ceres SEQ ID NO 14311095 as cited in SEQ ID NO 53197

SEQ ID NO: 116150 - protein, 495 aa, Arabidopsis thaliana; identical to SEQ ID NO: 104911
  peptide (1)..(495): Ceres Seq. ID no. 13616042

SEQ ID NO: 116151 - protein, 470 aa, Arabidopsis thaliana; identical to SEQ ID NO: 104912
  peptide (1)..(470): Ceres Seq. ID no. 13616043

SEQ ID NO: 116152 - protein, 465 aa, Arabidopsis thaliana; identical to SEQ ID NO: 104913
  peptide (1)..(465): Ceres Seq. ID no. 13616044

SEQ ID NO: 116153 - DNA, 1484 bp, Arabidopsis thaliana; identical to SEQ ID NO: 104914
  misc_feature (1)..(1484): Ceres Seq. ID no. 13616045
  misc_feature (1)..(1484): Ortholog of  Ceres SEQ ID NO 13595529 as cited in SEQ ID NO 56687

SEQ ID NO: 116154 - protein, 421 aa, Arabidopsis thaliana; identical to SEQ ID NO: 104915
  peptide (1)..(421): Ceres Seq. ID no. 13616046

SEQ ID NO: 116155 - protein, 398 aa, Arabidopsis thaliana; identical to SEQ ID NO: 104916
  peptide (1)..(398): Ceres Seq. ID no. 13616047

SEQ ID NO: 116156 - DNA, 822 bp, Arabidopsis thaliana; identical to SEQ ID NO: 104917
  misc_feature (1)..(822): Ceres Seq. ID no. 13616048
  misc_feature (1)..(822): Ortholog of  Ceres SEQ ID NO 14307709 as cited in SEQ ID NO 59484
  misc_feature (1)..(822): Ortholog of  Ceres SEQ ID NO 13598153 as cited in SEQ ID NO 61562

SEQ ID NO: 116157 - protein, 210 aa, Arabidopsis thaliana; identical to SEQ ID NO: 104918
  peptide (1)..(210): Ceres Seq. ID no. 13616049

SEQ ID NO: 116158 - protein, 192 aa, Arabidopsis thaliana; identical to SEQ ID NO: 104919
  peptide (1)..(192): Ceres Seq. ID no. 13616050

SEQ ID NO: 116159 - protein, 163 aa, Arabidopsis thaliana; identical to SEQ ID NO: 104920
  peptide (1)..(163): Ceres Seq. ID no. 13616051

SEQ ID NO: 116160 - DNA, 1488 bp, Arabidopsis thaliana; identical to SEQ ID NO: 104921
  misc_feature (1)..(1488): Ceres Seq. ID no. 13616052
  misc_feature (1)..(1488): Ortholog of  Ceres SEQ ID NO 15226540 as cited in SEQ ID NO 58479
  misc_feature (1)..(1488): Ortholog of  Ceres SEQ ID NO 13581611 as cited in SEQ ID NO 59028
  misc_feature (1)..(1488): Ortholog of  Ceres SEQ ID NO 13596689 as cited in SEQ ID NO 62728

SEQ ID NO: 116161 - protein, 335 aa, Arabidopsis thaliana; identical to SEQ ID NO: 104922
  peptide (1)..(335): Ceres Seq. ID no. 13616053

SEQ ID NO: 116162 - protein, 320 aa, Arabidopsis thaliana; identical to SEQ ID NO: 104923
  peptide (1)..(320): Ceres Seq. ID no. 13616054

SEQ ID NO: 116163 - protein, 318 aa, Arabidopsis thaliana; identical to SEQ ID NO: 104924
  peptide (1)..(318): Ceres Seq. ID no. 13616055

SEQ ID NO: 116164 - DNA, 1063 bp, Arabidopsis thaliana; identical to SEQ ID NO: 104925
  misc_feature (1)..(1063): Ceres Seq. ID no. 13616056
  misc_feature (1)..(1063): Ortholog of  Ceres SEQ ID NO 14307296 as cited in SEQ ID NO 53966
  misc_feature (1)..(1063): Ortholog of  Ceres SEQ ID NO 15225423 as cited in SEQ ID NO 64689

SEQ ID NO: 116165 - protein, 262 aa, Arabidopsis thaliana; identical to SEQ ID NO: 26991
  peptide (1)..(262): Ceres Seq. ID no. 13616057

SEQ ID NO: 116166 - protein, 252 aa, Arabidopsis thaliana; identical to SEQ ID NO: 26992
  peptide (1)..(252): Ceres Seq. ID no. 13616058

SEQ ID NO: 116167 - protein, 250 aa, Arabidopsis thaliana; identical to SEQ ID NO: 26993
  peptide (1)..(250): Ceres Seq. ID no. 13616059

SEQ ID NO: 116168 - DNA, 1139 bp, Arabidopsis thaliana; identical to SEQ ID NO: 104929
  misc_feature (1)..(1139): Ceres Seq. ID no. 13616064
  misc_feature (1)..(1139): Ortholog of  Ceres SEQ ID NO 14312901 as cited in SEQ ID NO 57146

SEQ ID NO: 116169 - protein, 181 aa, Arabidopsis thaliana; identical to SEQ ID NO: 43079
  peptide (1)..(181): Ceres Seq. ID no. 13616065

SEQ ID NO: 116170 - protein, 143 aa, Arabidopsis thaliana; identical to SEQ ID NO: 43080
  peptide (1)..(143): Ceres Seq. ID no. 13616066

SEQ ID NO: 116171 - DNA, 1249 bp, Arabidopsis thaliana; identical to SEQ ID NO: 104932
  misc_feature (1)..(1249): Ceres Seq. ID no. 13616076
  misc_feature (1)..(1249): Ortholog of  Ceres SEQ ID NO 15169053 as cited in SEQ ID NO 53926

SEQ ID NO: 116172 - protein, 296 aa, Arabidopsis thaliana; identical to SEQ ID NO: 104933
  peptide (1)..(296): Ceres Seq. ID no. 13616077

SEQ ID NO: 116173 - protein, 295 aa, Arabidopsis thaliana; identical to SEQ ID NO: 104934
  peptide (1)..(295): Ceres Seq. ID no. 13616078

SEQ ID NO: 116174 - protein, 268 aa, Arabidopsis thaliana; identical to SEQ ID NO: 73466
  peptide (1)..(268): Ceres Seq. ID no. 13616079

SEQ ID NO: 116175 - DNA, 952 bp, Arabidopsis thaliana; identical to SEQ ID NO: 104936
  misc_feature (1)..(952): Ceres Seq. ID no. 13616090
  misc_feature (1)..(952): Ortholog of  Ceres SEQ ID NO 15226909 as cited in SEQ ID NO 61336
  misc_feature (1)..(952): Ortholog of  Ceres SEQ ID NO 15179474 as cited in SEQ ID NO 0

SEQ ID NO: 116176 - protein, 288 aa, Arabidopsis thaliana; identical to SEQ ID NO: 104937
  peptide (1)..(288): Ceres Seq. ID no. 13616091

SEQ ID NO: 116177 - protein, 279 aa, Arabidopsis thaliana; identical to SEQ ID NO: 104938
  peptide (1)..(279): Ceres Seq. ID no. 13616092

SEQ ID NO: 116178 - protein, 235 aa, Arabidopsis thaliana; identical to SEQ ID NO: 104939
  peptide (1)..(235): Ceres Seq. ID no. 13616093

SEQ ID NO: 116179 - DNA, 975 bp, Arabidopsis thaliana; identical to SEQ ID NO: 104940
  misc_feature (1)..(975): Ceres Seq. ID no. 13616116
  misc_feature (1)..(975): Ortholog of  Ceres SEQ ID NO 13638599 as cited in SEQ ID NO 51866

SEQ ID NO: 116180 - protein, 253 aa, Arabidopsis thaliana; identical to SEQ ID NO: 104941
  peptide (1)..(253): Ceres Seq. ID no. 13616117

SEQ ID NO: 116181 - protein, 221 aa, Arabidopsis thaliana; identical to SEQ ID NO: 21867
  peptide (1)..(221): Ceres Seq. ID no. 13616118

SEQ ID NO: 116182 - DNA, 1754 bp, Arabidopsis thaliana; identical to SEQ ID NO: 104943
  misc_feature (1)..(1754): Ceres Seq. ID no. 13616122
  misc_feature (1)..(1754): Ortholog of  Ceres SEQ ID NO 15177320 as cited in SEQ ID NO 52645
  misc_feature (1)..(1754): Ortholog of  Ceres SEQ ID NO 15171359 as cited in SEQ ID NO 57279
  misc_feature (1)..(1754): Ortholog of  Ceres SEQ ID NO 14313840 as cited in SEQ ID NO 59568
  misc_feature (1)..(1754): Ortholog of  Ceres SEQ ID NO 13662245 as cited in SEQ ID NO 62708
  misc_feature (1)..(1754): Ortholog of  Ceres SEQ ID NO 14314084 as cited in SEQ ID NO 63256
  misc_feature (1)..(1754): Ortholog of  Ceres SEQ ID NO 14303091 as cited in SEQ ID NO 66369

SEQ ID NO: 116183 - protein, 474 aa, Arabidopsis thaliana; identical to SEQ ID NO: 37702
  peptide (1)..(474): Ceres Seq. ID no. 13616123

SEQ ID NO: 116184 - DNA, 906 bp, Arabidopsis thaliana; identical to SEQ ID NO: 104945
  misc_feature (1)..(906): Ceres Seq. ID no. 13616132
  misc_feature (1)..(906): Ortholog of  Ceres SEQ ID NO 12616162 as cited in SEQ ID NO 63260

SEQ ID NO: 116185 - protein, 276 aa, Arabidopsis thaliana; identical to SEQ ID NO: 104946
  peptide (1)..(276): Ceres Seq. ID no. 13616133

SEQ ID NO: 116186 - protein, 261 aa, Arabidopsis thaliana; identical to SEQ ID NO: 104947
  peptide (1)..(261): Ceres Seq. ID no. 13616134

SEQ ID NO: 116187 - protein, 176 aa, Arabidopsis thaliana; identical to SEQ ID NO: 30953
  peptide (1)..(176): Ceres Seq. ID no. 13616135

SEQ ID NO: 116188 - DNA, 1039 bp, Arabidopsis thaliana; identical to SEQ ID NO: 104949
  misc_feature (1)..(1039): Ceres Seq. ID no. 13616140
  misc_feature (1)..(1039): Ortholog of  Ceres SEQ ID NO 15176379 as cited in SEQ ID NO 59735

SEQ ID NO: 116189 - protein, 206 aa, Arabidopsis thaliana; identical to SEQ ID NO: 25658
  peptide (1)..(206): Ceres Seq. ID no. 13616141

SEQ ID NO: 116190 - protein, 160 aa, Arabidopsis thaliana; identical to SEQ ID NO: 25659
  peptide (1)..(160): Ceres Seq. ID no. 13616142

SEQ ID NO: 116191 - protein, 146 aa, Arabidopsis thaliana; identical to SEQ ID NO: 25660
  peptide (1)..(146): Ceres Seq. ID no. 13616143

SEQ ID NO: 116192 - DNA, 1433 bp, Arabidopsis thaliana; identical to SEQ ID NO: 104953
  misc_feature (1)..(1433): Ceres Seq. ID no. 13616147
  misc_feature (1)..(1433): Ortholog of  Ceres SEQ ID NO 13654989 as cited in SEQ ID NO 63117
  misc_feature (1)..(1433): Ortholog of  Ceres SEQ ID NO 13584744 as cited in SEQ ID NO 69137

SEQ ID NO: 116193 - protein, 412 aa, Arabidopsis thaliana; identical to SEQ ID NO: 104954
  peptide (1)..(412): Ceres Seq. ID no. 13616148

SEQ ID NO: 116194 - protein, 410 aa, Arabidopsis thaliana; identical to SEQ ID NO: 104955
  peptide (1)..(410): Ceres Seq. ID no. 13616149

SEQ ID NO: 116195 - protein, 372 aa, Arabidopsis thaliana; identical to SEQ ID NO: 104956
  peptide (1)..(372): Ceres Seq. ID no. 13616150

SEQ ID NO: 116196 - DNA, 1199 bp, Arabidopsis thaliana; identical to SEQ ID NO: 104957
  misc_feature (1)..(1199): Ceres Seq. ID no. 13616161
  misc_feature (1)..(1199): Ortholog of  Ceres SEQ ID NO 14311543 as cited in SEQ ID NO 51619
  misc_feature (1)..(1199): Ortholog of  Ceres SEQ ID NO 14302378 as cited in SEQ ID NO 67409

SEQ ID NO: 116197 - protein, 318 aa, Arabidopsis thaliana; identical to SEQ ID NO: 22124
  peptide (1)..(318): Ceres Seq. ID no. 13616162

SEQ ID NO: 116198 - DNA, 1549 bp, Arabidopsis thaliana; identical to SEQ ID NO: 104959
  misc_feature (1)..(1549): Ceres Seq. ID no. 13616163
  misc_feature (1)..(1549): Ortholog of  Ceres SEQ ID NO 12625388 as cited in SEQ ID NO 63299
  misc_feature (1)..(1549): Ortholog of  Ceres SEQ ID NO 15179860 as cited in SEQ ID NO 66716

SEQ ID NO: 116199 - protein, 449 aa, Arabidopsis thaliana; identical to SEQ ID NO: 36484
  peptide (1)..(449): Ceres Seq. ID no. 13616164

SEQ ID NO: 116200 - DNA, 1032 bp, Arabidopsis thaliana; identical to SEQ ID NO: 104961
  misc_feature (1)..(1032): Ceres Seq. ID no. 13616173
  misc_feature (1)..(1032): Ortholog of  Ceres SEQ ID NO 12623011 as cited in SEQ ID NO 67651

SEQ ID NO: 116201 - protein, 273 aa, Arabidopsis thaliana; identical to SEQ ID NO: 25736
  peptide (1)..(273): Ceres Seq. ID no. 13616174

SEQ ID NO: 116202 - protein, 207 aa, Arabidopsis thaliana; identical to SEQ ID NO: 25737
  peptide (1)..(207): Ceres Seq. ID no. 13616175

SEQ ID NO: 116203 - protein, 196 aa, Arabidopsis thaliana; identical to SEQ ID NO: 25738
  peptide (1)..(196): Ceres Seq. ID no. 13616176

SEQ ID NO: 116204 - DNA, 705 bp, Arabidopsis thaliana; identical to SEQ ID NO: 104965
  misc_feature (1)..(705): Ceres Seq. ID no. 13616177
  misc_feature (1)..(705): Ortholog of  Ceres SEQ ID NO 12611141 as cited in SEQ ID NO 55992

SEQ ID NO: 116205 - protein, 133 aa, Arabidopsis thaliana; identical to SEQ ID NO: 26809
  peptide (1)..(133): Ceres Seq. ID no. 13616178

SEQ ID NO: 116206 - protein, 77 aa, Arabidopsis thaliana; identical to SEQ ID NO: 26810
  peptide (1)..(77): Ceres Seq. ID no. 13616179

SEQ ID NO: 116207 - DNA, 1168 bp, Arabidopsis thaliana; identical to SEQ ID NO: 104968
  misc_feature (1)..(1168): Ceres Seq. ID no. 13616184
  misc_feature (1)..(1168): Ortholog of  Ceres SEQ ID NO 13596208 as cited in SEQ ID NO 68507

SEQ ID NO: 116208 - protein, 303 aa, Arabidopsis thaliana; identical to SEQ ID NO: 104969
  peptide (1)..(303): Ceres Seq. ID no. 13616185

SEQ ID NO: 116209 - protein, 176 aa, Arabidopsis thaliana; identical to SEQ ID NO: 104970
  peptide (1)..(176): Ceres Seq. ID no. 13616186

SEQ ID NO: 116210 - DNA, 918 bp, Arabidopsis thaliana; identical to SEQ ID NO: 104971
  misc_feature (1)..(918): Ceres Seq. ID no. 13616191
  misc_feature (1)..(918): Ortholog of  Ceres SEQ ID NO 13587227 as cited in SEQ ID NO 513
  misc_feature (1)..(918): Ortholog of  Ceres SEQ ID NO 13594494 as cited in SEQ ID NO 51293
  misc_feature (1)..(918): Ortholog of  Ceres SEQ ID NO 13595538 as cited in SEQ ID NO 59858
  misc_feature (1)..(918): Ortholog of  Ceres SEQ ID NO 12598249 as cited in SEQ ID NO 61073
  misc_feature (1)..(918): Ortholog of  Ceres SEQ ID NO 13582815 as cited in SEQ ID NO 68106

SEQ ID NO: 116211 - protein, 179 aa, Arabidopsis thaliana; identical to SEQ ID NO: 27992
  peptide (1)..(179): Ceres Seq. ID no. 13616192

SEQ ID NO: 116212 - DNA, 1625 bp, Arabidopsis thaliana; identical to SEQ ID NO: 104973
  misc_feature (1)..(1625): Ceres Seq. ID no. 13616193
  misc_feature (1)..(1625): Ortholog of  Ceres SEQ ID NO 13656404 as cited in SEQ ID NO 65806
  misc_feature (1)..(1625): Ortholog of  Ceres SEQ ID NO 12779935 as cited in SEQ ID NO 66774
  misc_feature (1)..(1625): Ortholog of  Ceres SEQ ID NO 13598695 as cited in SEQ ID NO 67368
  misc_feature (1)..(1625): Ortholog of  Ceres SEQ ID NO 13591174 as cited in SEQ ID NO 68289

SEQ ID NO: 116213 - protein, 397 aa, Arabidopsis thaliana; identical to SEQ ID NO: 104974
  peptide (1)..(397): Ceres Seq. ID no. 13616194

SEQ ID NO: 116214 - protein, 380 aa, Arabidopsis thaliana; identical to SEQ ID NO: 104975
  peptide (1)..(380): Ceres Seq. ID no. 13616195

SEQ ID NO: 116215 - protein, 317 aa, Arabidopsis thaliana; identical to SEQ ID NO: 28624
  peptide (1)..(317): Ceres Seq. ID no. 13616196

SEQ ID NO: 116216 - DNA, 1981 bp, Arabidopsis thaliana; identical to SEQ ID NO: 104977
  misc_feature (1)..(1981): Ceres Seq. ID no. 13616205
  misc_feature (1)..(1981): Ortholog of  Ceres SEQ ID NO 14315430 as cited in SEQ ID NO 57618
  misc_feature (1)..(1981): Ortholog of  Ceres SEQ ID NO 13623344 as cited in SEQ ID NO 0

SEQ ID NO: 116217 - protein, 541 aa, Arabidopsis thaliana; identical to SEQ ID NO: 104978
  peptide (1)..(541): Ceres Seq. ID no. 13616206

SEQ ID NO: 116218 - protein, 470 aa, Arabidopsis thaliana; identical to SEQ ID NO: 104979
  peptide (1)..(470): Ceres Seq. ID no. 13616207

SEQ ID NO: 116219 - protein, 432 aa, Arabidopsis thaliana; identical to SEQ ID NO: 104980
  peptide (1)..(432): Ceres Seq. ID no. 13616208

SEQ ID NO: 116220 - DNA, 1156 bp, Arabidopsis thaliana; identical to SEQ ID NO: 104981
  misc_feature (1)..(1156): Ceres Seq. ID no. 13616224
  misc_feature (1)..(1156): Ortholog of  Ceres SEQ ID NO 13582350 as cited in SEQ ID NO 56734
  misc_feature (1)..(1156): Ortholog of  Ceres SEQ ID NO 12476493 as cited in SEQ ID NO 58163
  misc_feature (1)..(1156): Ortholog of  Ceres SEQ ID NO 12578315 as cited in SEQ ID NO 62451
  misc_feature (1)..(1156): Ortholog of  Ceres SEQ ID NO 12615466 as cited in SEQ ID NO 62761
  misc_feature (1)..(1156): Ortholog of  Ceres SEQ ID NO 13597295 as cited in SEQ ID NO 63743
  misc_feature (1)..(1156): Ortholog of  Ceres SEQ ID NO 12617090 as cited in SEQ ID NO 64005
  misc_feature (1)..(1156): Ortholog of  Ceres SEQ ID NO 13597439 as cited in SEQ ID NO 64081
  misc_feature (1)..(1156): Ortholog of  Ceres SEQ ID NO 13597233 as cited in SEQ ID NO 64370
  misc_feature (1)..(1156): Ortholog of  Ceres SEQ ID NO 13599438 as cited in SEQ ID NO 0

SEQ ID NO: 116221 - protein, 258 aa, Arabidopsis thaliana; identical to SEQ ID NO: 104982
  peptide (1)..(258): Ceres Seq. ID no. 13616225

SEQ ID NO: 116222 - protein, 245 aa, Arabidopsis thaliana; identical to SEQ ID NO: 104983
  peptide (1)..(245): Ceres Seq. ID no. 13616226

SEQ ID NO: 116223 - protein, 223 aa, Arabidopsis thaliana; identical to SEQ ID NO: 104984
  peptide (1)..(223): Ceres Seq. ID no. 13616227

SEQ ID NO: 116224 - DNA, 1624 bp, Arabidopsis thaliana; identical to SEQ ID NO: 104985
  misc_feature (1)..(1624): Ceres Seq. ID no. 13616228
  misc_feature (1)..(1624): Ortholog of  Ceres SEQ ID NO 12611829 as cited in SEQ ID NO 56771
  misc_feature (1)..(1624): Ortholog of  Ceres SEQ ID NO 15171735 as cited in SEQ ID NO 57234
  misc_feature (1)..(1624): Ortholog of  Ceres SEQ ID NO 13597018 as cited in SEQ ID NO 64288
  misc_feature (1)..(1624): Ortholog of  Ceres SEQ ID NO 14305124 as cited in SEQ ID NO 0

SEQ ID NO: 116225 - protein, 259 aa, Arabidopsis thaliana; identical to SEQ ID NO: 104986
  peptide (1)..(259): Ceres Seq. ID no. 13616229

SEQ ID NO: 116226 - protein, 244 aa, Arabidopsis thaliana; identical to SEQ ID NO: 104987
  peptide (1)..(244): Ceres Seq. ID no. 13616230

SEQ ID NO: 116227 - protein, 228 aa, Arabidopsis thaliana; identical to SEQ ID NO: 104988
  peptide (1)..(228): Ceres Seq. ID no. 13616231

SEQ ID NO: 116228 - DNA, 2843 bp, Arabidopsis thaliana; identical to SEQ ID NO: 104989
  misc_feature (1)..(2843): Ceres Seq. ID no. 13616241
  misc_feature (1)..(2843): Ortholog of  Ceres SEQ ID NO 14310452 as cited in SEQ ID NO 54426
  misc_feature (1)..(2843): Ortholog of  Ceres SEQ ID NO 15169663 as cited in SEQ ID NO 64659
  misc_feature (1)..(2843): Ortholog of  Ceres SEQ ID NO 13656177 as cited in SEQ ID NO 64997
  misc_feature (1)..(2843): Ortholog of  Ceres SEQ ID NO 15225015 as cited in SEQ ID NO 0

SEQ ID NO: 116229 - protein, 789 aa, Arabidopsis thaliana; identical to SEQ ID NO: 100733
  peptide (1)..(789): Ceres Seq. ID no. 13616242

SEQ ID NO: 116230 - protein, 620 aa, Arabidopsis thaliana; identical to SEQ ID NO: 100734
  peptide (1)..(620): Ceres Seq. ID no. 13616243

SEQ ID NO: 116231 - protein, 533 aa, Arabidopsis thaliana; identical to SEQ ID NO: 100735
  peptide (1)..(533): Ceres Seq. ID no. 13616244

SEQ ID NO: 116232 - DNA, 1251 bp, Arabidopsis thaliana; identical to SEQ ID NO: 104993
  misc_feature (1)..(1251): Ceres Seq. ID no. 13616245
  misc_feature (1)..(1251): Ortholog of  Ceres SEQ ID NO 14310880 as cited in SEQ ID NO 55342
  misc_feature (1)..(1251): Ortholog of  Ceres SEQ ID NO 14313451 as cited in SEQ ID NO 62474

SEQ ID NO: 116233 - protein, 367 aa, Arabidopsis thaliana; identical to SEQ ID NO: 104994
  peptide (1)..(367): Ceres Seq. ID no. 13616246

SEQ ID NO: 116234 - protein, 364 aa, Arabidopsis thaliana; identical to SEQ ID NO: 104995
  peptide (1)..(364): Ceres Seq. ID no. 13616247

SEQ ID NO: 116235 - protein, 240 aa, Arabidopsis thaliana; identical to SEQ ID NO: 29469
  peptide (1)..(240): Ceres Seq. ID no. 13616248

SEQ ID NO: 116236 - DNA, 932 bp, Arabidopsis thaliana; identical to SEQ ID NO: 104997
  misc_feature (1)..(932): Ceres Seq. ID no. 13616249
  misc_feature (1)..(932): Ortholog of  Ceres SEQ ID NO 13599613 as cited in SEQ ID NO 0
  misc_feature (1)..(932): Ortholog of  Ceres SEQ ID NO 15179570 as cited in SEQ ID NO 0

SEQ ID NO: 116237 - protein, 262 aa, Arabidopsis thaliana; identical to SEQ ID NO: 104998
  peptide (1)..(262): Ceres Seq. ID no. 13616250

SEQ ID NO: 116238 - protein, 157 aa, Arabidopsis thaliana; identical to SEQ ID NO: 104999
  peptide (1)..(157): Ceres Seq. ID no. 13616251

SEQ ID NO: 116239 - protein, 149 aa, Arabidopsis thaliana; identical to SEQ ID NO: 105000
  peptide (1)..(149): Ceres Seq. ID no. 13616252

SEQ ID NO: 116240 - DNA, 1622 bp, Arabidopsis thaliana; identical to SEQ ID NO: 105001
  misc_feature (1)..(1622): Ceres Seq. ID no. 13616257
  misc_feature (1)..(1622): Ortholog of  Ceres SEQ ID NO 14302216 as cited in SEQ ID NO 66456

SEQ ID NO: 116241 - protein, 328 aa, Arabidopsis thaliana; identical to SEQ ID NO: 25040
  peptide (1)..(328): Ceres Seq. ID no. 13616258

SEQ ID NO: 116242 - protein, 272 aa, Arabidopsis thaliana; identical to SEQ ID NO: 25041
  peptide (1)..(272): Ceres Seq. ID no. 13616259

SEQ ID NO: 116243 - protein, 269 aa, Arabidopsis thaliana; identical to SEQ ID NO: 25042
  peptide (1)..(269): Ceres Seq. ID no. 13616260

SEQ ID NO: 116244 - DNA, 757 bp, Arabidopsis thaliana; identical to SEQ ID NO: 105005
  misc_feature (1)..(757): Ceres Seq. ID no. 13616261
  misc_feature (1)..(757): Ortholog of  Ceres SEQ ID NO 15171235 as cited in SEQ ID NO 52469
  misc_feature (1)..(757): Ortholog of  Ceres SEQ ID NO 15172705 as cited in SEQ ID NO 56069
  misc_feature (1)..(757): Ortholog of  Ceres SEQ ID NO 12627215 as cited in SEQ ID NO 60976
  misc_feature (1)..(757): Ortholog of  Ceres SEQ ID NO 13654980 as cited in SEQ ID NO 63094
  misc_feature (1)..(757): Ortholog of  Ceres SEQ ID NO 15178542 as cited in SEQ ID NO 65410
  misc_feature (1)..(757): Ortholog of  Ceres SEQ ID NO 15174852 as cited in SEQ ID NO 67166
  misc_feature (1)..(757): Ortholog of  Ceres SEQ ID NO 12589584 as cited in SEQ ID NO 0
  misc_feature (1)..(757): Ortholog of  Ceres SEQ ID NO 12635657 as cited in SEQ ID NO 0
  misc_feature (1)..(757): Ortholog of  Ceres SEQ ID NO 12635879 as cited in SEQ ID NO 0
  misc_feature (1)..(757): Ortholog of  Ceres SEQ ID NO 13599649 as cited in SEQ ID NO 0
  misc_feature (1)..(757): Ortholog of  Ceres SEQ ID NO 14309205 as cited in SEQ ID NO 0
  misc_feature (1)..(757): Ortholog of  Ceres SEQ ID NO 14309404 as cited in SEQ ID NO 0
  misc_feature (1)..(757): Ortholog of  Ceres SEQ ID NO 15177492 as cited in SEQ ID NO 0

SEQ ID NO: 116245 - protein, 174 aa, Arabidopsis thaliana; identical to SEQ ID NO: 23152
  peptide (1)..(174): Ceres Seq. ID no. 13616262

SEQ ID NO: 116246 - protein, 164 aa, Arabidopsis thaliana; identical to SEQ ID NO: 23153
  peptide (1)..(164): Ceres Seq. ID no. 13616263

SEQ ID NO: 116247 - protein, 152 aa, Arabidopsis thaliana; identical to SEQ ID NO: 23154
  peptide (1)..(152): Ceres Seq. ID no. 13616264

SEQ ID NO: 116248 - DNA, 1201 bp, Arabidopsis thaliana; identical to SEQ ID NO: 105009
  misc_feature (1)..(1201): Ceres Seq. ID no. 13616265
  misc_feature (1)..(1201): Ortholog of  Ceres SEQ ID NO 15179023 as cited in SEQ ID NO 0

SEQ ID NO: 116249 - protein, 321 aa, Arabidopsis thaliana; identical to SEQ ID NO: 105010
  peptide (1)..(321): Ceres Seq. ID no. 13616266

SEQ ID NO: 116250 - protein, 161 aa, Arabidopsis thaliana; identical to SEQ ID NO: 49377
  peptide (1)..(161): Ceres Seq. ID no. 13616267

SEQ ID NO: 116251 - DNA, 1082 bp, Arabidopsis thaliana; identical to SEQ ID NO: 105012
  misc_feature (1)..(1082): Ceres Seq. ID no. 13616268
  misc_feature (1)..(1082): Ortholog of  Ceres SEQ ID NO 14307424 as cited in SEQ ID NO 54228
  misc_feature (1)..(1082): Ortholog of  Ceres SEQ ID NO 13664279 as cited in SEQ ID NO 61603
  misc_feature (1)..(1082): Ortholog of  Ceres SEQ ID NO 13584254 as cited in SEQ ID NO 63465

SEQ ID NO: 116252 - protein, 258 aa, Arabidopsis thaliana; identical to SEQ ID NO: 20928
  peptide (1)..(258): Ceres Seq. ID no. 13616269

SEQ ID NO: 116253 - protein, 257 aa, Arabidopsis thaliana; identical to SEQ ID NO: 20929
  peptide (1)..(257): Ceres Seq. ID no. 13616270

SEQ ID NO: 116254 - protein, 203 aa, Arabidopsis thaliana; identical to SEQ ID NO: 20930
  peptide (1)..(203): Ceres Seq. ID no. 13616271

SEQ ID NO: 116255 - DNA, 1101 bp, Arabidopsis thaliana; identical to SEQ ID NO: 105016
  misc_feature (1)..(1101): Ceres Seq. ID no. 13616275
  misc_feature (1)..(1101): Ortholog of  Ceres SEQ ID NO 13656486 as cited in SEQ ID NO 69202

SEQ ID NO: 116256 - protein, 269 aa, Arabidopsis thaliana; identical to SEQ ID NO: 105017
  peptide (1)..(269): Ceres Seq. ID no. 13616276

SEQ ID NO: 116257 - protein, 241 aa, Arabidopsis thaliana; identical to SEQ ID NO: 42097
  peptide (1)..(241): Ceres Seq. ID no. 13616277

SEQ ID NO: 116258 - protein, 205 aa, Arabidopsis thaliana; identical to SEQ ID NO: 42098
  peptide (1)..(205): Ceres Seq. ID no. 13616278

SEQ ID NO: 116259 - DNA, 1165 bp, Arabidopsis thaliana; identical to SEQ ID NO: 105020
  misc_feature (1)..(1165): Ceres Seq. ID no. 13616283
  misc_feature (1)..(1165): Ortholog of  Ceres SEQ ID NO 12474685 as cited in SEQ ID NO 88
  misc_feature (1)..(1165): Ortholog of  Ceres SEQ ID NO 13638574 as cited in SEQ ID NO 51223
  misc_feature (1)..(1165): Ortholog of  Ceres SEQ ID NO 12610790 as cited in SEQ ID NO 56123
  misc_feature (1)..(1165): Ortholog of  Ceres SEQ ID NO 13655636 as cited in SEQ ID NO 63519
  misc_feature (1)..(1165): Ortholog of  Ceres SEQ ID NO 13655896 as cited in SEQ ID NO 64970
  misc_feature (1)..(1165): Ortholog of  Ceres SEQ ID NO 12627322 as cited in SEQ ID NO 67162

SEQ ID NO: 116260 - protein, 309 aa, Arabidopsis thaliana; identical to SEQ ID NO: 25625
  peptide (1)..(309): Ceres Seq. ID no. 13616284

SEQ ID NO: 116261 - protein, 299 aa, Arabidopsis thaliana; identical to SEQ ID NO: 25626
  peptide (1)..(299): Ceres Seq. ID no. 13616285

SEQ ID NO: 116262 - protein, 289 aa, Arabidopsis thaliana; identical to SEQ ID NO: 25627
  peptide (1)..(289): Ceres Seq. ID no. 13616286

SEQ ID NO: 116263 - DNA, 1088 bp, Arabidopsis thaliana; identical to SEQ ID NO: 105024
  misc_feature (1)..(1088): Ceres Seq. ID no. 13616287
  misc_feature (1)..(1088): Ortholog of  Ceres SEQ ID NO 12474685 as cited in SEQ ID NO 88
  misc_feature (1)..(1088): Ortholog of  Ceres SEQ ID NO 13638574 as cited in SEQ ID NO 51223
  misc_feature (1)..(1088): Ortholog of  Ceres SEQ ID NO 12610790 as cited in SEQ ID NO 56123
  misc_feature (1)..(1088): Ortholog of  Ceres SEQ ID NO 13655636 as cited in SEQ ID NO 63519
  misc_feature (1)..(1088): Ortholog of  Ceres SEQ ID NO 13655896 as cited in SEQ ID NO 64970
  misc_feature (1)..(1088): Ortholog of  Ceres SEQ ID NO 12627322 as cited in SEQ ID NO 67162

SEQ ID NO: 116264 - protein, 309 aa, Arabidopsis thaliana; identical to SEQ ID NO: 105025
  peptide (1)..(309): Ceres Seq. ID no. 13616288

SEQ ID NO: 116265 - protein, 299 aa, Arabidopsis thaliana; identical to SEQ ID NO: 105026
  peptide (1)..(299): Ceres Seq. ID no. 13616289

SEQ ID NO: 116266 - protein, 289 aa, Arabidopsis thaliana; identical to SEQ ID NO: 105027
  peptide (1)..(289): Ceres Seq. ID no. 13616290

SEQ ID NO: 116267 - DNA, 1324 bp, Arabidopsis thaliana; identical to SEQ ID NO: 105028
  misc_feature (1)..(1324): Ceres Seq. ID no. 13616294
  misc_feature (1)..(1324): Ortholog of  Ceres SEQ ID NO 13596554 as cited in SEQ ID NO 62818

SEQ ID NO: 116268 - protein, 346 aa, Arabidopsis thaliana; identical to SEQ ID NO: 42809
  peptide (1)..(346): Ceres Seq. ID no. 13616295

SEQ ID NO: 116269 - protein, 267 aa, Arabidopsis thaliana; identical to SEQ ID NO: 42810
  peptide (1)..(267): Ceres Seq. ID no. 13616296

SEQ ID NO: 116270 - protein, 258 aa, Arabidopsis thaliana; identical to SEQ ID NO: 42811
  peptide (1)..(258): Ceres Seq. ID no. 13616297

SEQ ID NO: 116271 - DNA, 972 bp, Arabidopsis thaliana; identical to SEQ ID NO: 105032
  misc_feature (1)..(972): Ceres Seq. ID no. 13616298
  misc_feature (1)..(972): Ortholog of  Ceres SEQ ID NO 14311859 as cited in SEQ ID NO 51658
  misc_feature (1)..(972): Ortholog of  Ceres SEQ ID NO 13638685 as cited in SEQ ID NO 51871
  misc_feature (1)..(972): Ortholog of  Ceres SEQ ID NO 13599200 as cited in SEQ ID NO 0

SEQ ID NO: 116272 - protein, 243 aa, Arabidopsis thaliana; identical to SEQ ID NO: 105033
  peptide (1)..(243): Ceres Seq. ID no. 13616299

SEQ ID NO: 116273 - protein, 195 aa, Arabidopsis thaliana; identical to SEQ ID NO: 105034
  peptide (1)..(195): Ceres Seq. ID no. 13616300

SEQ ID NO: 116274 - protein, 185 aa, Arabidopsis thaliana; identical to SEQ ID NO: 105035
  peptide (1)..(185): Ceres Seq. ID no. 13616301

SEQ ID NO: 116275 - DNA, 1892 bp, Arabidopsis thaliana; identical to SEQ ID NO: 105036
  misc_feature (1)..(1892): Ceres Seq. ID no. 13616306
  misc_feature (1)..(1892): Ortholog of  Ceres SEQ ID NO 14303109 as cited in SEQ ID NO 66330

SEQ ID NO: 116276 - protein, 564 aa, Arabidopsis thaliana; identical to SEQ ID NO: 105037
  peptide (1)..(564): Ceres Seq. ID no. 13616307

SEQ ID NO: 116277 - protein, 544 aa, Arabidopsis thaliana; identical to SEQ ID NO: 105038
  peptide (1)..(544): Ceres Seq. ID no. 13616308

SEQ ID NO: 116278 - protein, 542 aa, Arabidopsis thaliana; identical to SEQ ID NO: 105039
  peptide (1)..(542): Ceres Seq. ID no. 13616309

SEQ ID NO: 116279 - DNA, 1258 bp, Arabidopsis thaliana; identical to SEQ ID NO: 105040
  misc_feature (1)..(1258): Ceres Seq. ID no. 13616314
  misc_feature (1)..(1258): Ortholog of  Ceres SEQ ID NO 13590691 as cited in SEQ ID NO 66290

SEQ ID NO: 116280 - protein, 370 aa, Arabidopsis thaliana; identical to SEQ ID NO: 105041
  peptide (1)..(370): Ceres Seq. ID no. 13616315

SEQ ID NO: 116281 - protein, 191 aa, Arabidopsis thaliana; identical to SEQ ID NO: 105042
  peptide (1)..(191): Ceres Seq. ID no. 13616316

SEQ ID NO: 116282 - DNA, 1066 bp, Arabidopsis thaliana; identical to SEQ ID NO: 105043
  misc_feature (1)..(1066): Ceres Seq. ID no. 13616325
  misc_feature (1)..(1066): Ortholog of  Ceres SEQ ID NO 13596358 as cited in SEQ ID NO 68333

SEQ ID NO: 116283 - protein, 275 aa, Arabidopsis thaliana; identical to SEQ ID NO: 105044
  peptide (1)..(275): Ceres Seq. ID no. 13616326

SEQ ID NO: 116284 - protein, 252 aa, Arabidopsis thaliana; identical to SEQ ID NO: 105045
  peptide (1)..(252): Ceres Seq. ID no. 13616327

SEQ ID NO: 116285 - protein, 238 aa, Arabidopsis thaliana; identical to SEQ ID NO: 40554
  peptide (1)..(238): Ceres Seq. ID no. 13616328

SEQ ID NO: 116286 - DNA, 1370 bp, Arabidopsis thaliana; identical to SEQ ID NO: 105047
  misc_feature (1)..(1370): Ceres Seq. ID no. 13616334
  misc_feature (1)..(1370): Ortholog of  Ceres SEQ ID NO 14306059 as cited in SEQ ID NO 52249
  misc_feature (1)..(1370): Ortholog of  Ceres SEQ ID NO 15170479 as cited in SEQ ID NO 52835
  misc_feature (1)..(1370): Ortholog of  Ceres SEQ ID NO 13596087 as cited in SEQ ID NO 68336

SEQ ID NO: 116287 - protein, 320 aa, Arabidopsis thaliana; identical to SEQ ID NO: 77403
  peptide (1)..(320): Ceres Seq. ID no. 13616335

SEQ ID NO: 116288 - protein, 302 aa, Arabidopsis thaliana; identical to SEQ ID NO: 77404
  peptide (1)..(302): Ceres Seq. ID no. 13616336

SEQ ID NO: 116289 - protein, 268 aa, Arabidopsis thaliana; identical to SEQ ID NO: 77405
  peptide (1)..(268): Ceres Seq. ID no. 13616337

SEQ ID NO: 116290 - DNA, 1262 bp, Arabidopsis thaliana; identical to SEQ ID NO: 105051
  misc_feature (1)..(1262): Ceres Seq. ID no. 13616342
  misc_feature (1)..(1262): Ortholog of  Ceres SEQ ID NO 14314434 as cited in SEQ ID NO 52401
  misc_feature (1)..(1262): Ortholog of  Ceres SEQ ID NO 14303939 as cited in SEQ ID NO 54286
  misc_feature (1)..(1262): Ortholog of  Ceres SEQ ID NO 14307760 as cited in SEQ ID NO 54741
  misc_feature (1)..(1262): Ortholog of  Ceres SEQ ID NO 15179003 as cited in SEQ ID NO 0

SEQ ID NO: 116291 - protein, 256 aa, Arabidopsis thaliana; identical to SEQ ID NO: 105052
  peptide (1)..(256): Ceres Seq. ID no. 13616343

SEQ ID NO: 116292 - protein, 223 aa, Arabidopsis thaliana; identical to SEQ ID NO: 105053
  peptide (1)..(223): Ceres Seq. ID no. 13616344

SEQ ID NO: 116293 - protein, 172 aa, Arabidopsis thaliana; identical to SEQ ID NO: 105054
  peptide (1)..(172): Ceres Seq. ID no. 13616345

SEQ ID NO: 116294 - DNA, 1714 bp, Arabidopsis thaliana; identical to SEQ ID NO: 105055
  misc_feature (1)..(1714): Ceres Seq. ID no. 13616358
  misc_feature (1)..(1714): Ortholog of  Ceres SEQ ID NO 12582229 as cited in SEQ ID NO 58499

SEQ ID NO: 116295 - protein, 397 aa, Arabidopsis thaliana; identical to SEQ ID NO: 105056
  peptide (1)..(397): Ceres Seq. ID no. 13616359

SEQ ID NO: 116296 - protein, 337 aa, Arabidopsis thaliana; identical to SEQ ID NO: 105057
  peptide (1)..(337): Ceres Seq. ID no. 13616360

SEQ ID NO: 116297 - protein, 310 aa, Arabidopsis thaliana; identical to SEQ ID NO: 105058
  peptide (1)..(310): Ceres Seq. ID no. 13616361

SEQ ID NO: 116298 - DNA, 829 bp, Arabidopsis thaliana; identical to SEQ ID NO: 105059
  misc_feature (1)..(829): Ceres Seq. ID no. 13616362
  misc_feature (1)..(829): Ortholog of  Ceres SEQ ID NO 13661994 as cited in SEQ ID NO 60568
  misc_feature (1)..(829): Ortholog of  Ceres SEQ ID NO 12584790 as cited in SEQ ID NO 62648

SEQ ID NO: 116299 - protein, 152 aa, Arabidopsis thaliana; identical to SEQ ID NO: 105060
  peptide (1)..(152): Ceres Seq. ID no. 13616363

SEQ ID NO: 116300 - protein, 143 aa, Arabidopsis thaliana; identical to SEQ ID NO: 105061
  peptide (1)..(143): Ceres Seq. ID no. 13616364

SEQ ID NO: 116301 - protein, 119 aa, Arabidopsis thaliana; identical to SEQ ID NO: 105062
  peptide (1)..(119): Ceres Seq. ID no. 13616365

SEQ ID NO: 116302 - DNA, 933 bp, Arabidopsis thaliana; identical to SEQ ID NO: 105063
  misc_feature (1)..(933): Ceres Seq. ID no. 13616377
  misc_feature (1)..(933): Ortholog of  Ceres SEQ ID NO 13638567 as cited in SEQ ID NO 51303
  misc_feature (1)..(933): Ortholog of  Ceres SEQ ID NO 12610031 as cited in SEQ ID NO 55811
  misc_feature (1)..(933): Ortholog of  Ceres SEQ ID NO 12610896 as cited in SEQ ID NO 55861
  misc_feature (1)..(933): Ortholog of  Ceres SEQ ID NO 12619664 as cited in SEQ ID NO 66048
  misc_feature (1)..(933): Ortholog of  Ceres SEQ ID NO 12635952 as cited in SEQ ID NO 0

SEQ ID NO: 116303 - protein, 242 aa, Arabidopsis thaliana; identical to SEQ ID NO: 105064
  peptide (1)..(242): Ceres Seq. ID no. 13616378

SEQ ID NO: 116304 - protein, 212 aa, Arabidopsis thaliana; identical to SEQ ID NO: 105065
  peptide (1)..(212): Ceres Seq. ID no. 13616379

SEQ ID NO: 116305 - DNA, 1372 bp, Arabidopsis thaliana; identical to SEQ ID NO: 105066
  misc_feature (1)..(1372): Ceres Seq. ID no. 13616380
  misc_feature (1)..(1372): Ortholog of  Ceres SEQ ID NO 13596625 as cited in SEQ ID NO 62876

SEQ ID NO: 116306 - protein, 344 aa, Arabidopsis thaliana; identical to SEQ ID NO: 24100
  peptide (1)..(344): Ceres Seq. ID no. 13616381

SEQ ID NO: 116307 - protein, 290 aa, Arabidopsis thaliana; identical to SEQ ID NO: 24101
  peptide (1)..(290): Ceres Seq. ID no. 13616382

SEQ ID NO: 116308 - protein, 284 aa, Arabidopsis thaliana; identical to SEQ ID NO: 24102
  peptide (1)..(284): Ceres Seq. ID no. 13616383

SEQ ID NO: 116309 - DNA, 1439 bp, Arabidopsis thaliana; identical to SEQ ID NO: 105070
  misc_feature (1)..(1439): Ceres Seq. ID no. 13616384
  misc_feature (1)..(1439): Ortholog of  Ceres SEQ ID NO 15168502 as cited in SEQ ID NO 60095
  misc_feature (1)..(1439): Ortholog of  Ceres SEQ ID NO 14314084 as cited in SEQ ID NO 63256
  misc_feature (1)..(1439): Ortholog of  Ceres SEQ ID NO 15169466 as cited in SEQ ID NO 66135

SEQ ID NO: 116310 - protein, 461 aa, Arabidopsis thaliana; identical to SEQ ID NO: 105071
  peptide (1)..(461): Ceres Seq. ID no. 13616385

SEQ ID NO: 116311 - protein, 353 aa, Arabidopsis thaliana; identical to SEQ ID NO: 91535
  peptide (1)..(353): Ceres Seq. ID no. 13616386

SEQ ID NO: 116312 - DNA, 983 bp, Arabidopsis thaliana; identical to SEQ ID NO: 105073
  misc_feature (1)..(983): Ceres Seq. ID no. 13616389
  misc_feature (1)..(983): Ortholog of  Ceres SEQ ID NO 12784040 as cited in SEQ ID NO 66597

SEQ ID NO: 116313 - protein, 240 aa, Arabidopsis thaliana; identical to SEQ ID NO: 105074
  peptide (1)..(240): Ceres Seq. ID no. 13616390

SEQ ID NO: 116314 - protein, 230 aa, Arabidopsis thaliana; identical to SEQ ID NO: 105075
  peptide (1)..(230): Ceres Seq. ID no. 13616391

SEQ ID NO: 116315 - protein, 212 aa, Arabidopsis thaliana; identical to SEQ ID NO: 105076
  peptide (1)..(212): Ceres Seq. ID no. 13616392

SEQ ID NO: 116316 - DNA, 1376 bp, Arabidopsis thaliana; identical to SEQ ID NO: 105077
  misc_feature (1)..(1376): Ceres Seq. ID no. 13616405
  misc_feature (1)..(1376): Ortholog of  Ceres SEQ ID NO 13595464 as cited in SEQ ID NO 59792
  misc_feature (1)..(1376): Ortholog of  Ceres SEQ ID NO 14316416 as cited in SEQ ID NO 60078

SEQ ID NO: 116317 - protein, 300 aa, Arabidopsis thaliana; identical to SEQ ID NO: 28839
  peptide (1)..(300): Ceres Seq. ID no. 13616406

SEQ ID NO: 116318 - protein, 303 aa, Arabidopsis thaliana; identical to SEQ ID NO: 28837
  peptide (1)..(303): Ceres Seq. ID no. 13616407

SEQ ID NO: 116319 - protein, 302 aa, Arabidopsis thaliana; identical to SEQ ID NO: 28838
  peptide (1)..(302): Ceres Seq. ID no. 13616408

SEQ ID NO: 116320 - DNA, 1776 bp, Arabidopsis thaliana; identical to SEQ ID NO: 105081
  misc_feature (1)..(1776): Ceres Seq. ID no. 13616417
  misc_feature (1)..(1776): Ortholog of  Ceres SEQ ID NO 14314404 as cited in SEQ ID NO 57421
  misc_feature (1)..(1776): Ortholog of  Ceres SEQ ID NO 13493536 as cited in SEQ ID NO 58515
  misc_feature (1)..(1776): Ortholog of  Ceres SEQ ID NO 12618461 as cited in SEQ ID NO 64349

SEQ ID NO: 116321 - protein, 548 aa, Arabidopsis thaliana; identical to SEQ ID NO: 105082
  peptide (1)..(548): Ceres Seq. ID no. 13616418

SEQ ID NO: 116322 - protein, 532 aa, Arabidopsis thaliana; identical to SEQ ID NO: 28155
  peptide (1)..(532): Ceres Seq. ID no. 13616419

SEQ ID NO: 116323 - protein, 394 aa, Arabidopsis thaliana; identical to SEQ ID NO: 28156
  peptide (1)..(394): Ceres Seq. ID no. 13616420

SEQ ID NO: 116324 - DNA, 1233 bp, Arabidopsis thaliana; identical to SEQ ID NO: 105085
  misc_feature (1)..(1233): Ceres Seq. ID no. 13616421
  misc_feature (1)..(1233): Ortholog of  Ceres SEQ ID NO 13594037 as cited in SEQ ID NO 55666

SEQ ID NO: 116325 - protein, 361 aa, Arabidopsis thaliana; identical to SEQ ID NO: 105086
  peptide (1)..(361): Ceres Seq. ID no. 13616422

SEQ ID NO: 116326 - protein, 350 aa, Arabidopsis thaliana; identical to SEQ ID NO: 105087
  peptide (1)..(350): Ceres Seq. ID no. 13616423

SEQ ID NO: 116327 - protein, 342 aa, Arabidopsis thaliana; identical to SEQ ID NO: 105088
  peptide (1)..(342): Ceres Seq. ID no. 13616424

SEQ ID NO: 116328 - DNA, 826 bp, Arabidopsis thaliana; identical to SEQ ID NO: 105089
  misc_feature (1)..(826): Ceres Seq. ID no. 13616425
  misc_feature (1)..(826): Ortholog of  Ceres SEQ ID NO 13638658 as cited in SEQ ID NO 51921
  misc_feature (1)..(826): Ortholog of  Ceres SEQ ID NO 14306522 as cited in SEQ ID NO 53365
  misc_feature (1)..(826): Ortholog of  Ceres SEQ ID NO 15175175 as cited in SEQ ID NO 0

SEQ ID NO: 116329 - protein, 223 aa, Arabidopsis thaliana; identical to SEQ ID NO: 105090
  peptide (1)..(223): Ceres Seq. ID no. 13616426

SEQ ID NO: 116330 - protein, 218 aa, Arabidopsis thaliana; identical to SEQ ID NO: 105091
  peptide (1)..(218): Ceres Seq. ID no. 13616427

SEQ ID NO: 116331 - DNA, 1399 bp, Arabidopsis thaliana; identical to SEQ ID NO: 105092
  misc_feature (1)..(1399): Ceres Seq. ID no. 13616439
  misc_feature (1)..(1399): Ortholog of  Ceres SEQ ID NO 13582619 as cited in SEQ ID NO 56520
  misc_feature (1)..(1399): Ortholog of  Ceres SEQ ID NO 14314632 as cited in SEQ ID NO 59923
  misc_feature (1)..(1399): Ortholog of  Ceres SEQ ID NO 13660872 as cited in SEQ ID NO 60830
  misc_feature (1)..(1399): Ortholog of  Ceres SEQ ID NO 12616221 as cited in SEQ ID NO 63291

SEQ ID NO: 116332 - protein, 329 aa, Arabidopsis thaliana; identical to SEQ ID NO: 23927
  peptide (1)..(329): Ceres Seq. ID no. 13616440

SEQ ID NO: 116333 - protein, 315 aa, Arabidopsis thaliana; identical to SEQ ID NO: 23928
  peptide (1)..(315): Ceres Seq. ID no. 13616441

SEQ ID NO: 116334 - protein, 214 aa, Arabidopsis thaliana; identical to SEQ ID NO: 23929
  peptide (1)..(214): Ceres Seq. ID no. 13616442

SEQ ID NO: 116335 - DNA, 1789 bp, Arabidopsis thaliana; identical to SEQ ID NO: 105096
  misc_feature (1)..(1789): Ceres Seq. ID no. 13616443
  misc_feature (1)..(1789): Ortholog of  Ceres SEQ ID NO 12605517 as cited in SEQ ID NO 20422

SEQ ID NO: 116336 - protein, 543 aa, Arabidopsis thaliana; identical to SEQ ID NO: 105097
  peptide (1)..(543): Ceres Seq. ID no. 13616444

SEQ ID NO: 116337 - protein, 521 aa, Arabidopsis thaliana; identical to SEQ ID NO: 105098
  peptide (1)..(521): Ceres Seq. ID no. 13616445

SEQ ID NO: 116338 - protein, 517 aa, Arabidopsis thaliana; identical to SEQ ID NO: 105099
  peptide (1)..(517): Ceres Seq. ID no. 13616446

SEQ ID NO: 116339 - DNA, 833 bp, Arabidopsis thaliana; identical to SEQ ID NO: 105100
  misc_feature (1)..(833): Ceres Seq. ID no. 13616447
  misc_feature (1)..(833): Ortholog of  Ceres SEQ ID NO 13659393 as cited in SEQ ID NO 67047
  misc_feature (1)..(833): Ortholog of  Ceres SEQ ID NO 12635162 as cited in SEQ ID NO 0

SEQ ID NO: 116340 - protein, 194 aa, Arabidopsis thaliana; identical to SEQ ID NO: 22354
  peptide (1)..(194): Ceres Seq. ID no. 13616448

SEQ ID NO: 116341 - protein, 182 aa, Arabidopsis thaliana; identical to SEQ ID NO: 22355
  peptide (1)..(182): Ceres Seq. ID no. 13616449

SEQ ID NO: 116342 - DNA, 695 bp, Arabidopsis thaliana; identical to SEQ ID NO: 105103
  misc_feature (1)..(695): Ceres Seq. ID no. 13616450
  misc_feature (1)..(695): Ortholog of  Ceres SEQ ID NO 15177923 as cited in SEQ ID NO 0

SEQ ID NO: 116343 - protein, 131 aa, Arabidopsis thaliana; identical to SEQ ID NO: 26292
  peptide (1)..(131): Ceres Seq. ID no. 13616451

SEQ ID NO: 116344 - protein, 113 aa, Arabidopsis thaliana; identical to SEQ ID NO: 105105
  peptide (1)..(113): Ceres Seq. ID no. 13616452

SEQ ID NO: 116345 - DNA, 1335 bp, Arabidopsis thaliana; identical to SEQ ID NO: 105106
  misc_feature (1)..(1335): Ceres Seq. ID no. 13616453
  misc_feature (1)..(1335): Ortholog of  Ceres SEQ ID NO 14301568 as cited in SEQ ID NO 66744

SEQ ID NO: 116346 - protein, 326 aa, Arabidopsis thaliana; identical to SEQ ID NO: 27481
  peptide (1)..(326): Ceres Seq. ID no. 13616454

SEQ ID NO: 116347 - protein, 318 aa, Arabidopsis thaliana; identical to SEQ ID NO: 27482
  peptide (1)..(318): Ceres Seq. ID no. 13616455

SEQ ID NO: 116348 - protein, 268 aa, Arabidopsis thaliana; identical to SEQ ID NO: 27483
  peptide (1)..(268): Ceres Seq. ID no. 13616456

SEQ ID NO: 116349 - DNA, 1631 bp, Arabidopsis thaliana; identical to SEQ ID NO: 105110
  misc_feature (1)..(1631): Ceres Seq. ID no. 13616457
  misc_feature (1)..(1631): Ortholog of  Ceres SEQ ID NO 14315241 as cited in SEQ ID NO 52516
  misc_feature (1)..(1631): Ortholog of  Ceres SEQ ID NO 13594349 as cited in SEQ ID NO 58161
  misc_feature (1)..(1631): Ortholog of  Ceres SEQ ID NO 13663419 as cited in SEQ ID NO 66561
  misc_feature (1)..(1631): Ortholog of  Ceres SEQ ID NO 15177892 as cited in SEQ ID NO 0

SEQ ID NO: 116350 - protein, 480 aa, Arabidopsis thaliana; identical to SEQ ID NO: 24868
  peptide (1)..(480): Ceres Seq. ID no. 13616458

SEQ ID NO: 116351 - protein, 350 aa, Arabidopsis thaliana; identical to SEQ ID NO: 24869
  peptide (1)..(350): Ceres Seq. ID no. 13616459

SEQ ID NO: 116352 - protein, 332 aa, Arabidopsis thaliana; identical to SEQ ID NO: 24870
  peptide (1)..(332): Ceres Seq. ID no. 13616460

SEQ ID NO: 116353 - DNA, 1753 bp, Arabidopsis thaliana; identical to SEQ ID NO: 105114
  misc_feature (1)..(1753): Ceres Seq. ID no. 13616469
  misc_feature (1)..(1753): Ortholog of  Ceres SEQ ID NO 14315146 as cited in SEQ ID NO 52929
  misc_feature (1)..(1753): Ortholog of  Ceres SEQ ID NO 14302263 as cited in SEQ ID NO 64701
  misc_feature (1)..(1753): Ortholog of  Ceres SEQ ID NO 13584538 as cited in SEQ ID NO 64739
  misc_feature (1)..(1753): Ortholog of  Ceres SEQ ID NO 15169643 as cited in SEQ ID NO 64826
  misc_feature (1)..(1753): Ortholog of  Ceres SEQ ID NO 15169647 as cited in SEQ ID NO 64930

SEQ ID NO: 116354 - protein, 534 aa, Arabidopsis thaliana; identical to SEQ ID NO: 105115
  peptide (1)..(534): Ceres Seq. ID no. 13616470

SEQ ID NO: 116355 - protein, 510 aa, Arabidopsis thaliana; identical to SEQ ID NO: 40331
  peptide (1)..(510): Ceres Seq. ID no. 13616471

SEQ ID NO: 116356 - protein, 474 aa, Arabidopsis thaliana; identical to SEQ ID NO: 40332
  peptide (1)..(474): Ceres Seq. ID no. 13616472

SEQ ID NO: 116357 - DNA, 1432 bp, Arabidopsis thaliana; identical to SEQ ID NO: 105118
  misc_feature (1)..(1432): Ceres Seq. ID no. 13616473
  misc_feature (1)..(1432): Ortholog of  Ceres SEQ ID NO 14314300 as cited in SEQ ID NO 57386
  misc_feature (1)..(1432): Ortholog of  Ceres SEQ ID NO 14311993 as cited in SEQ ID NO 60371
  misc_feature (1)..(1432): Ortholog of  Ceres SEQ ID NO 13596509 as cited in SEQ ID NO 62004
  misc_feature (1)..(1432): Ortholog of  Ceres SEQ ID NO 13500385 as cited in SEQ ID NO 67583

SEQ ID NO: 116358 - protein, 353 aa, Arabidopsis thaliana; identical to SEQ ID NO: 105119
  peptide (1)..(353): Ceres Seq. ID no. 13616474

SEQ ID NO: 116359 - protein, 322 aa, Arabidopsis thaliana; identical to SEQ ID NO: 105120
  peptide (1)..(322): Ceres Seq. ID no. 13616475

SEQ ID NO: 116360 - protein, 277 aa, Arabidopsis thaliana; identical to SEQ ID NO: 105121
  peptide (1)..(277): Ceres Seq. ID no. 13616476

SEQ ID NO: 116361 - DNA, 1677 bp, Arabidopsis thaliana; identical to SEQ ID NO: 105122
  misc_feature (1)..(1677): Ceres Seq. ID no. 13616477
  misc_feature (1)..(1677): Ortholog of  Ceres SEQ ID NO 13596216 as cited in SEQ ID NO 68515

SEQ ID NO: 116362 - protein, 363 aa, Arabidopsis thaliana; identical to SEQ ID NO: 25729
  peptide (1)..(363): Ceres Seq. ID no. 13616478

SEQ ID NO: 116363 - protein, 251 aa, Arabidopsis thaliana; identical to SEQ ID NO: 25730
  peptide (1)..(251): Ceres Seq. ID no. 13616479

SEQ ID NO: 116364 - DNA, 858 bp, Arabidopsis thaliana; identical to SEQ ID NO: 105125
  misc_feature (1)..(858): Ceres Seq. ID no. 13616508
  misc_feature (1)..(858): Ortholog of  Ceres SEQ ID NO 13574766 as cited in SEQ ID NO 33

SEQ ID NO: 116365 - protein, 245 aa, Arabidopsis thaliana; identical to SEQ ID NO: 105126
  peptide (1)..(245): Ceres Seq. ID no. 13616509

SEQ ID NO: 116366 - protein, 234 aa, Arabidopsis thaliana; identical to SEQ ID NO: 43967
  peptide (1)..(234): Ceres Seq. ID no. 13616510

SEQ ID NO: 116367 - protein, 212 aa, Arabidopsis thaliana; identical to SEQ ID NO: 43968
  peptide (1)..(212): Ceres Seq. ID no. 13616511

SEQ ID NO: 116368 - DNA, 968 bp, Arabidopsis thaliana; identical to SEQ ID NO: 105129
  misc_feature (1)..(968): Ceres Seq. ID no. 13616516
  misc_feature (1)..(968): Ortholog of  Ceres SEQ ID NO 13599585 as cited in SEQ ID NO 988
  misc_feature (1)..(968): Ortholog of  Ceres SEQ ID NO 13594624 as cited in SEQ ID NO 55765
  misc_feature (1)..(968): Ortholog of  Ceres SEQ ID NO 15177682 as cited in SEQ ID NO 0

SEQ ID NO: 116369 - protein, 262 aa, Arabidopsis thaliana; identical to SEQ ID NO: 105130
  peptide (1)..(262): Ceres Seq. ID no. 13616517

SEQ ID NO: 116370 - protein, 170 aa, Arabidopsis thaliana; identical to SEQ ID NO: 105131
  peptide (1)..(170): Ceres Seq. ID no. 13616518

SEQ ID NO: 116371 - DNA, 2958 bp, Arabidopsis thaliana; identical to SEQ ID NO: 105132
  misc_feature (1)..(2958): Ceres Seq. ID no. 13616523
  misc_feature (1)..(2958): Ortholog of  Ceres SEQ ID NO 15168977 as cited in SEQ ID NO 20587

SEQ ID NO: 116372 - protein, 862 aa, Arabidopsis thaliana; identical to SEQ ID NO: 38304
  peptide (1)..(862): Ceres Seq. ID no. 13616524

SEQ ID NO: 116373 - protein, 765 aa, Arabidopsis thaliana; identical to SEQ ID NO: 38305
  peptide (1)..(765): Ceres Seq. ID no. 13616525

SEQ ID NO: 116374 - protein, 761 aa, Arabidopsis thaliana; identical to SEQ ID NO: 38306
  peptide (1)..(761): Ceres Seq. ID no. 13616526

SEQ ID NO: 116375 - DNA, 1058 bp, Arabidopsis thaliana; identical to SEQ ID NO: 105136
  misc_feature (1)..(1058): Ceres Seq. ID no. 13616527
  misc_feature (1)..(1058): Ortholog of  Ceres SEQ ID NO 15169191 as cited in SEQ ID NO 58440
  misc_feature (1)..(1058): Ortholog of  Ceres SEQ ID NO 13597523 as cited in SEQ ID NO 64778

SEQ ID NO: 116376 - protein, 312 aa, Arabidopsis thaliana; identical to SEQ ID NO: 105137
  peptide (1)..(312): Ceres Seq. ID no. 13616528

SEQ ID NO: 116377 - protein, 264 aa, Arabidopsis thaliana; identical to SEQ ID NO: 105138
  peptide (1)..(264): Ceres Seq. ID no. 13616529

SEQ ID NO: 116378 - protein, 210 aa, Arabidopsis thaliana; identical to SEQ ID NO: 105139
  peptide (1)..(210): Ceres Seq. ID no. 13616530

SEQ ID NO: 116379 - DNA, 842 bp, Arabidopsis thaliana; identical to SEQ ID NO: 105140
  misc_feature (1)..(842): Ceres Seq. ID no. 13616539
  misc_feature (1)..(842): Ortholog of  Ceres SEQ ID NO 13599448 as cited in SEQ ID NO 521
  misc_feature (1)..(842): Ortholog of  Ceres SEQ ID NO 13596408 as cited in SEQ ID NO 62028

SEQ ID NO: 116380 - protein, 191 aa, Arabidopsis thaliana; identical to SEQ ID NO: 26957
  peptide (1)..(191): Ceres Seq. ID no. 13616540

SEQ ID NO: 116381 - protein, 119 aa, Arabidopsis thaliana; identical to SEQ ID NO: 26958
  peptide (1)..(119): Ceres Seq. ID no. 13616541

SEQ ID NO: 116382 - DNA, 1057 bp, Arabidopsis thaliana; identical to SEQ ID NO: 105143
  misc_feature (1)..(1057): Ceres Seq. ID no. 13616542
  misc_feature (1)..(1057): Ortholog of  Ceres SEQ ID NO 15168525 as cited in SEQ ID NO 58192

SEQ ID NO: 116383 - protein, 274 aa, Arabidopsis thaliana; identical to SEQ ID NO: 105144
  peptide (1)..(274): Ceres Seq. ID no. 13616543

SEQ ID NO: 116384 - protein, 269 aa, Arabidopsis thaliana; identical to SEQ ID NO: 105145
  peptide (1)..(269): Ceres Seq. ID no. 13616544

SEQ ID NO: 116385 - protein, 264 aa, Arabidopsis thaliana; identical to SEQ ID NO: 105146
  peptide (1)..(264): Ceres Seq. ID no. 13616545

SEQ ID NO: 116386 - DNA, 1294 bp, Arabidopsis thaliana; identical to SEQ ID NO: 105147
  misc_feature (1)..(1294): Ceres Seq. ID no. 13616548
  misc_feature (1)..(1294): Ortholog of  Ceres SEQ ID NO 13582332 as cited in SEQ ID NO 59890
  misc_feature (1)..(1294): Ortholog of  Ceres SEQ ID NO 13598278 as cited in SEQ ID NO 68456

SEQ ID NO: 116387 - protein, 394 aa, Arabidopsis thaliana; identical to SEQ ID NO: 105148
  peptide (1)..(394): Ceres Seq. ID no. 13616549

SEQ ID NO: 116388 - protein, 387 aa, Arabidopsis thaliana; identical to SEQ ID NO: 105149
  peptide (1)..(387): Ceres Seq. ID no. 13616550

SEQ ID NO: 116389 - protein, 386 aa, Arabidopsis thaliana; identical to SEQ ID NO: 105150
  peptide (1)..(386): Ceres Seq. ID no. 13616551

SEQ ID NO: 116390 - DNA, 1185 bp, Arabidopsis thaliana; identical to SEQ ID NO: 105151
  misc_feature (1)..(1185): Ceres Seq. ID no. 13616568
  misc_feature (1)..(1185): Ortholog of  Ceres SEQ ID NO 13594341 as cited in SEQ ID NO 57917
  misc_feature (1)..(1185): Ortholog of  Ceres SEQ ID NO 13656441 as cited in SEQ ID NO 65703

SEQ ID NO: 116391 - protein, 276 aa, Arabidopsis thaliana; identical to SEQ ID NO: 29479
  peptide (1)..(276): Ceres Seq. ID no. 13616569

SEQ ID NO: 116392 - protein, 263 aa, Arabidopsis thaliana; identical to SEQ ID NO: 29480
  peptide (1)..(263): Ceres Seq. ID no. 13616570

SEQ ID NO: 116393 - protein, 251 aa, Arabidopsis thaliana; identical to SEQ ID NO: 29481
  peptide (1)..(251): Ceres Seq. ID no. 13616571

SEQ ID NO: 116394 - DNA, 629 bp, Arabidopsis thaliana; identical to SEQ ID NO: 105155
  misc_feature (1)..(629): Ceres Seq. ID no. 13616572
  misc_feature (1)..(629): Ortholog of  Ceres SEQ ID NO 14302679 as cited in SEQ ID NO 0

SEQ ID NO: 116395 - protein, 146 aa, Arabidopsis thaliana; identical to SEQ ID NO: 105156
  peptide (1)..(146): Ceres Seq. ID no. 13616573

SEQ ID NO: 116396 - DNA, 1624 bp, Arabidopsis thaliana; identical to SEQ ID NO: 105157
  misc_feature (1)..(1624): Ceres Seq. ID no. 13616589
  misc_feature (1)..(1624): Ortholog of  Ceres SEQ ID NO 13660287 as cited in SEQ ID NO 67316

SEQ ID NO: 116397 - protein, 476 aa, Arabidopsis thaliana; identical to SEQ ID NO: 22024
  peptide (1)..(476): Ceres Seq. ID no. 13616590

SEQ ID NO: 116398 - protein, 439 aa, Arabidopsis thaliana; identical to SEQ ID NO: 22025
  peptide (1)..(439): Ceres Seq. ID no. 13616591

SEQ ID NO: 116399 - protein, 423 aa, Arabidopsis thaliana; identical to SEQ ID NO: 22026
  peptide (1)..(423): Ceres Seq. ID no. 13616592

SEQ ID NO: 116400 - DNA, 795 bp, Arabidopsis thaliana; identical to SEQ ID NO: 105161
  misc_feature (1)..(795): Ceres Seq. ID no. 13616605
  misc_feature (1)..(795): Ortholog of  Ceres SEQ ID NO 14306406 as cited in SEQ ID NO 1412
  misc_feature (1)..(795): Ortholog of  Ceres SEQ ID NO 14309488 as cited in SEQ ID NO 52755
  misc_feature (1)..(795): Ortholog of  Ceres SEQ ID NO 15178824 as cited in SEQ ID NO 0

SEQ ID NO: 116401 - protein, 206 aa, Arabidopsis thaliana; identical to SEQ ID NO: 105162
  peptide (1)..(206): Ceres Seq. ID no. 13616606

SEQ ID NO: 116402 - protein, 185 aa, Arabidopsis thaliana; identical to SEQ ID NO: 20825
  peptide (1)..(185): Ceres Seq. ID no. 13616607

SEQ ID NO: 116403 - DNA, 1017 bp, Arabidopsis thaliana; identical to SEQ ID NO: 105164
  misc_feature (1)..(1017): Ceres Seq. ID no. 13616612
  misc_feature (1)..(1017): Ortholog of  Ceres SEQ ID NO 12617197 as cited in SEQ ID NO 63406
  misc_feature (1)..(1017): Ortholog of  Ceres SEQ ID NO 13597804 as cited in SEQ ID NO 64182
  misc_feature (1)..(1017): Ortholog of  Ceres SEQ ID NO 13598565 as cited in SEQ ID NO 65250
  misc_feature (1)..(1017): Ortholog of  Ceres SEQ ID NO 13598597 as cited in SEQ ID NO 65496
  misc_feature (1)..(1017): Ortholog of  Ceres SEQ ID NO 13596284 as cited in SEQ ID NO 68273
  misc_feature (1)..(1017): Ortholog of  Ceres SEQ ID NO 14308995 as cited in SEQ ID NO 0

SEQ ID NO: 116404 - protein, 338 aa, Arabidopsis thaliana; identical to SEQ ID NO: 105165
  peptide (1)..(338): Ceres Seq. ID no. 13616613

SEQ ID NO: 116405 - protein, 325 aa, Arabidopsis thaliana; identical to SEQ ID NO: 105166
  peptide (1)..(325): Ceres Seq. ID no. 13616614

SEQ ID NO: 116406 - DNA, 1227 bp, Arabidopsis thaliana; identical to SEQ ID NO: 105167
  misc_feature (1)..(1227): Ceres Seq. ID no. 13616619
  misc_feature (1)..(1227): Ortholog of  Ceres SEQ ID NO 13639514 as cited in SEQ ID NO 55736
  misc_feature (1)..(1227): Ortholog of  Ceres SEQ ID NO 13662804 as cited in SEQ ID NO 65394
  misc_feature (1)..(1227): Ortholog of  Ceres SEQ ID NO 13656519 as cited in SEQ ID NO 69226

SEQ ID NO: 116407 - protein, 245 aa, Arabidopsis thaliana; identical to SEQ ID NO: 105168
  peptide (1)..(245): Ceres Seq. ID no. 13616620

SEQ ID NO: 116408 - protein, 242 aa, Arabidopsis thaliana; identical to SEQ ID NO: 105169
  peptide (1)..(242): Ceres Seq. ID no. 13616621

SEQ ID NO: 116409 - protein, 241 aa, Arabidopsis thaliana; identical to SEQ ID NO: 105170
  peptide (1)..(241): Ceres Seq. ID no. 13616622

SEQ ID NO: 116410 - DNA, 1867 bp, Arabidopsis thaliana; identical to SEQ ID NO: 105171
  misc_feature (1)..(1867): Ceres Seq. ID no. 13616635
  misc_feature (1)..(1867): Ortholog of  Ceres SEQ ID NO 15168366 as cited in SEQ ID NO 60199

SEQ ID NO: 116411 - protein, 597 aa, Arabidopsis thaliana; identical to SEQ ID NO: 26626
  peptide (1)..(597): Ceres Seq. ID no. 13616636

SEQ ID NO: 116412 - protein, 575 aa, Arabidopsis thaliana; identical to SEQ ID NO: 26627
  peptide (1)..(575): Ceres Seq. ID no. 13616637

SEQ ID NO: 116413 - protein, 550 aa, Arabidopsis thaliana; identical to SEQ ID NO: 26628
  peptide (1)..(550): Ceres Seq. ID no. 13616638

SEQ ID NO: 116414 - DNA, 851 bp, Arabidopsis thaliana; identical to SEQ ID NO: 105175
  misc_feature (1)..(851): Ceres Seq. ID no. 13616643
  misc_feature (1)..(851): Ortholog of  Ceres SEQ ID NO 15171426 as cited in SEQ ID NO 51543
  misc_feature (1)..(851): Ortholog of  Ceres SEQ ID NO 14311780 as cited in SEQ ID NO 59241
  misc_feature (1)..(851): Ortholog of  Ceres SEQ ID NO 13584630 as cited in SEQ ID NO 65282

SEQ ID NO: 116415 - protein, 226 aa, Arabidopsis thaliana; identical to SEQ ID NO: 105176
  peptide (1)..(226): Ceres Seq. ID no. 13616644

SEQ ID NO: 116416 - protein, 207 aa, Arabidopsis thaliana; identical to SEQ ID NO: 105177
  peptide (1)..(207): Ceres Seq. ID no. 13616645

SEQ ID NO: 116417 - protein, 193 aa, Arabidopsis thaliana; identical to SEQ ID NO: 105178
  peptide (1)..(193): Ceres Seq. ID no. 13616646

SEQ ID NO: 116418 - DNA, 1170 bp, Arabidopsis thaliana; identical to SEQ ID NO: 105179
  misc_feature (1)..(1170): Ceres Seq. ID no. 13616647
  misc_feature (1)..(1170): Ortholog of  Ceres SEQ ID NO 13654583 as cited in SEQ ID NO 68599

SEQ ID NO: 116419 - protein, 349 aa, Arabidopsis thaliana; identical to SEQ ID NO: 28907
  peptide (1)..(349): Ceres Seq. ID no. 13616648

SEQ ID NO: 116420 - protein, 339 aa, Arabidopsis thaliana; identical to SEQ ID NO: 28908
  peptide (1)..(339): Ceres Seq. ID no. 13616649

SEQ ID NO: 116421 - protein, 337 aa, Arabidopsis thaliana; identical to SEQ ID NO: 28909
  peptide (1)..(337): Ceres Seq. ID no. 13616650

SEQ ID NO: 116422 - DNA, 1397 bp, Arabidopsis thaliana; identical to SEQ ID NO: 105183
  misc_feature (1)..(1397): Ceres Seq. ID no. 13616651
  misc_feature (1)..(1397): Ortholog of  Ceres SEQ ID NO 15177750 as cited in SEQ ID NO 57772
  misc_feature (1)..(1397): Ortholog of  Ceres SEQ ID NO 13596581 as cited in SEQ ID NO 62420
  misc_feature (1)..(1397): Ortholog of  Ceres SEQ ID NO 13591273 as cited in SEQ ID NO 65904
  misc_feature (1)..(1397): Ortholog of  Ceres SEQ ID NO 13623086 as cited in SEQ ID NO 0

SEQ ID NO: 116423 - protein, 398 aa, Arabidopsis thaliana; identical to SEQ ID NO: 26842
  peptide (1)..(398): Ceres Seq. ID no. 13616652

SEQ ID NO: 116424 - protein, 379 aa, Arabidopsis thaliana; identical to SEQ ID NO: 26843
  peptide (1)..(379): Ceres Seq. ID no. 13616653

SEQ ID NO: 116425 - protein, 268 aa, Arabidopsis thaliana; identical to SEQ ID NO: 26844
  peptide (1)..(268): Ceres Seq. ID no. 13616654

SEQ ID NO: 116426 - DNA, 973 bp, Arabidopsis thaliana; identical to SEQ ID NO: 105187
  misc_feature (1)..(973): Ceres Seq. ID no. 13616661
  misc_feature (1)..(973): Ortholog of  Ceres SEQ ID NO 13595166 as cited in SEQ ID NO 56250
  misc_feature (1)..(973): Ortholog of  Ceres SEQ ID NO 13599417 as cited in SEQ ID NO 0

SEQ ID NO: 116427 - protein, 241 aa, Arabidopsis thaliana; identical to SEQ ID NO: 37868
  peptide (1)..(241): Ceres Seq. ID no. 13616662

SEQ ID NO: 116428 - protein, 213 aa, Arabidopsis thaliana; identical to SEQ ID NO: 37869
  peptide (1)..(213): Ceres Seq. ID no. 13616663

SEQ ID NO: 116429 - DNA, 1167 bp, Arabidopsis thaliana; identical to SEQ ID NO: 105190
  misc_feature (1)..(1167): Ceres Seq. ID no. 13616664
  misc_feature (1)..(1167): Ortholog of  Ceres SEQ ID NO 15170881 as cited in SEQ ID NO 54654

SEQ ID NO: 116430 - protein, 313 aa, Arabidopsis thaliana; identical to SEQ ID NO: 98100
  peptide (1)..(313): Ceres Seq. ID no. 13616665

SEQ ID NO: 116431 - protein, 270 aa, Arabidopsis thaliana; identical to SEQ ID NO: 98101
  peptide (1)..(270): Ceres Seq. ID no. 13616666

SEQ ID NO: 116432 - protein, 197 aa, Arabidopsis thaliana; identical to SEQ ID NO: 27602
  peptide (1)..(197): Ceres Seq. ID no. 13616667

SEQ ID NO: 116433 - DNA, 1299 bp, Arabidopsis thaliana; identical to SEQ ID NO: 105194
  misc_feature (1)..(1299): Ceres Seq. ID no. 13616684
  misc_feature (1)..(1299): Ortholog of  Ceres SEQ ID NO 13648449 as cited in SEQ ID NO 171
  misc_feature (1)..(1299): Ortholog of  Ceres SEQ ID NO 15176325 as cited in SEQ ID NO 52802
  misc_feature (1)..(1299): Ortholog of  Ceres SEQ ID NO 15176313 as cited in SEQ ID NO 52831

SEQ ID NO: 116434 - protein, 423 aa, Arabidopsis thaliana; identical to SEQ ID NO: 105195
  peptide (1)..(423): Ceres Seq. ID no. 13616685

SEQ ID NO: 116435 - protein, 406 aa, Arabidopsis thaliana; identical to SEQ ID NO: 105196
  peptide (1)..(406): Ceres Seq. ID no. 13616686

SEQ ID NO: 116436 - protein, 349 aa, Arabidopsis thaliana; identical to SEQ ID NO: 105197
  peptide (1)..(349): Ceres Seq. ID no. 13616687

SEQ ID NO: 116437 - DNA, 2010 bp, Arabidopsis thaliana; identical to SEQ ID NO: 105198
  misc_feature (1)..(2010): Ceres Seq. ID no. 13616688
  misc_feature (1)..(2010): Ortholog of  Ceres SEQ ID NO 14314144 as cited in SEQ ID NO 54403
  misc_feature (1)..(2010): Ortholog of  Ceres SEQ ID NO 15225015 as cited in SEQ ID NO 0

SEQ ID NO: 116438 - protein, 616 aa, Arabidopsis thaliana; identical to SEQ ID NO: 105199
  peptide (1)..(616): Ceres Seq. ID no. 13616689

SEQ ID NO: 116439 - protein, 593 aa, Arabidopsis thaliana; identical to SEQ ID NO: 40741
  peptide (1)..(593): Ceres Seq. ID no. 13616690

SEQ ID NO: 116440 - protein, 502 aa, Arabidopsis thaliana; identical to SEQ ID NO: 40742
  peptide (1)..(502): Ceres Seq. ID no. 13616691

SEQ ID NO: 116441 - DNA, 1384 bp, Arabidopsis thaliana; identical to SEQ ID NO: 105202
  misc_feature (1)..(1384): Ceres Seq. ID no. 13616696
  misc_feature (1)..(1384): Ortholog of  Ceres SEQ ID NO 12636774 as cited in SEQ ID NO 372
  misc_feature (1)..(1384): Ortholog of  Ceres SEQ ID NO 14310917 as cited in SEQ ID NO 53231
  misc_feature (1)..(1384): Ortholog of  Ceres SEQ ID NO 15175492 as cited in SEQ ID NO 56277
  misc_feature (1)..(1384): Ortholog of  Ceres SEQ ID NO 13582350 as cited in SEQ ID NO 56734
  misc_feature (1)..(1384): Ortholog of  Ceres SEQ ID NO 12476493 as cited in SEQ ID NO 58163
  misc_feature (1)..(1384): Ortholog of  Ceres SEQ ID NO 14310807 as cited in SEQ ID NO 58696
  misc_feature (1)..(1384): Ortholog of  Ceres SEQ ID NO 12578315 as cited in SEQ ID NO 62451
  misc_feature (1)..(1384): Ortholog of  Ceres SEQ ID NO 12615466 as cited in SEQ ID NO 62761
  misc_feature (1)..(1384): Ortholog of  Ceres SEQ ID NO 13597295 as cited in SEQ ID NO 63743
  misc_feature (1)..(1384): Ortholog of  Ceres SEQ ID NO 12617090 as cited in SEQ ID NO 64005
  misc_feature (1)..(1384): Ortholog of  Ceres SEQ ID NO 15226458 as cited in SEQ ID NO 64042
  misc_feature (1)..(1384): Ortholog of  Ceres SEQ ID NO 13597439 as cited in SEQ ID NO 64081
  misc_feature (1)..(1384): Ortholog of  Ceres SEQ ID NO 13597233 as cited in SEQ ID NO 64370
  misc_feature (1)..(1384): Ortholog of  Ceres SEQ ID NO 13598327 as cited in SEQ ID NO 68040

SEQ ID NO: 116442 - protein, 371 aa, Arabidopsis thaliana; identical to SEQ ID NO: 29095
  peptide (1)..(371): Ceres Seq. ID no. 13616697

SEQ ID NO: 116443 - protein, 355 aa, Arabidopsis thaliana; identical to SEQ ID NO: 29096
  peptide (1)..(355): Ceres Seq. ID no. 13616698

SEQ ID NO: 116444 - protein, 290 aa, Arabidopsis thaliana; identical to SEQ ID NO: 29097
  peptide (1)..(290): Ceres Seq. ID no. 13616699

SEQ ID NO: 116445 - DNA, 1702 bp, Arabidopsis thaliana; identical to SEQ ID NO: 105206
  misc_feature (1)..(1702): Ceres Seq. ID no. 13616704
  misc_feature (1)..(1702): Ortholog of  Ceres SEQ ID NO 13638402 as cited in SEQ ID NO 60300
  misc_feature (1)..(1702): Ortholog of  Ceres SEQ ID NO 12618349 as cited in SEQ ID NO 64838
  misc_feature (1)..(1702): Ortholog of  Ceres SEQ ID NO 15176161 as cited in SEQ ID NO 0

SEQ ID NO: 116446 - protein, 309 aa, Arabidopsis thaliana; identical to SEQ ID NO: 105207
  peptide (1)..(309): Ceres Seq. ID no. 13616705

SEQ ID NO: 116447 - protein, 307 aa, Arabidopsis thaliana; identical to SEQ ID NO: 105208
  peptide (1)..(307): Ceres Seq. ID no. 13616706

SEQ ID NO: 116448 - protein, 264 aa, Arabidopsis thaliana; identical to SEQ ID NO: 42381
  peptide (1)..(264): Ceres Seq. ID no. 13616707

SEQ ID NO: 116449 - DNA, 1518 bp, Arabidopsis thaliana; identical to SEQ ID NO: 105210
  misc_feature (1)..(1518): Ceres Seq. ID no. 13616712
  misc_feature (1)..(1518): Ortholog of  Ceres SEQ ID NO 14316025 as cited in SEQ ID NO 65242

SEQ ID NO: 116450 - protein, 404 aa, Arabidopsis thaliana; identical to SEQ ID NO: 38696
  peptide (1)..(404): Ceres Seq. ID no. 13616713

SEQ ID NO: 116451 - protein, 292 aa, Arabidopsis thaliana; identical to SEQ ID NO: 38697
  peptide (1)..(292): Ceres Seq. ID no. 13616714

SEQ ID NO: 116452 - protein, 260 aa, Arabidopsis thaliana; identical to SEQ ID NO: 38698
  peptide (1)..(260): Ceres Seq. ID no. 13616715

SEQ ID NO: 116453 - DNA, 1061 bp, Arabidopsis thaliana; identical to SEQ ID NO: 105214
  misc_feature (1)..(1061): Ceres Seq. ID no. 13616716
  misc_feature (1)..(1061): Ortholog of  Ceres SEQ ID NO 12472003 as cited in SEQ ID NO 143

SEQ ID NO: 116454 - protein, 282 aa, Arabidopsis thaliana; identical to SEQ ID NO: 37416
  peptide (1)..(282): Ceres Seq. ID no. 13616717

SEQ ID NO: 116455 - protein, 260 aa, Arabidopsis thaliana; identical to SEQ ID NO: 29738
  peptide (1)..(260): Ceres Seq. ID no. 13616718

SEQ ID NO: 116456 - protein, 223 aa, Arabidopsis thaliana; identical to SEQ ID NO: 29739
  peptide (1)..(223): Ceres Seq. ID no. 13616719

SEQ ID NO: 116457 - DNA, 1081 bp, Arabidopsis thaliana; identical to SEQ ID NO: 105218
  misc_feature (1)..(1081): Ceres Seq. ID no. 13616720
  misc_feature (1)..(1081): Ortholog of  Ceres SEQ ID NO 14305022 as cited in SEQ ID NO 53586
  misc_feature (1)..(1081): Ortholog of  Ceres SEQ ID NO 12506279 as cited in SEQ ID NO 55440
  misc_feature (1)..(1081): Ortholog of  Ceres SEQ ID NO 13654847 as cited in SEQ ID NO 62459
  misc_feature (1)..(1081): Ortholog of  Ceres SEQ ID NO 15174357 as cited in SEQ ID NO 0

SEQ ID NO: 116458 - protein, 259 aa, Arabidopsis thaliana; identical to SEQ ID NO: 40915
  peptide (1)..(259): Ceres Seq. ID no. 13616721

SEQ ID NO: 116459 - DNA, 991 bp, Arabidopsis thaliana; identical to SEQ ID NO: 105220
  misc_feature (1)..(991): Ceres Seq. ID no. 13616722
  misc_feature (1)..(991): Ortholog of  Ceres SEQ ID NO 13661767 as cited in SEQ ID NO 61423

SEQ ID NO: 116460 - protein, 199 aa, Arabidopsis thaliana; identical to SEQ ID NO: 26430
  peptide (1)..(199): Ceres Seq. ID no. 13616723

SEQ ID NO: 116461 - protein, 182 aa, Arabidopsis thaliana; identical to SEQ ID NO: 26431
  peptide (1)..(182): Ceres Seq. ID no. 13616724

SEQ ID NO: 116462 - protein, 125 aa, Arabidopsis thaliana; identical to SEQ ID NO: 25190
  peptide (1)..(125): Ceres Seq. ID no. 13616725

SEQ ID NO: 116463 - DNA, 927 bp, Arabidopsis thaliana; identical to SEQ ID NO: 105224
  misc_feature (1)..(927): Ceres Seq. ID no. 13616726
  misc_feature (1)..(927): Ortholog of  Ceres SEQ ID NO 13661767 as cited in SEQ ID NO 61423

SEQ ID NO: 116464 - protein, 192 aa, Arabidopsis thaliana; identical to SEQ ID NO: 105225
  peptide (1)..(192): Ceres Seq. ID no. 13616727

SEQ ID NO: 116465 - protein, 175 aa, Arabidopsis thaliana; identical to SEQ ID NO: 105226
  peptide (1)..(175): Ceres Seq. ID no. 13616728

SEQ ID NO: 116466 - protein, 118 aa, Arabidopsis thaliana; identical to SEQ ID NO: 105227
  peptide (1)..(118): Ceres Seq. ID no. 13616729

SEQ ID NO: 116467 - DNA, 729 bp, Arabidopsis thaliana; identical to SEQ ID NO: 105228
  misc_feature (1)..(729): Ceres Seq. ID no. 13616730
  misc_feature (1)..(729): Ortholog of  Ceres SEQ ID NO 15168553 as cited in SEQ ID NO 57750

SEQ ID NO: 116468 - protein, 179 aa, Arabidopsis thaliana; identical to SEQ ID NO: 105229
  peptide (1)..(179): Ceres Seq. ID no. 13616731

SEQ ID NO: 116469 - protein, 156 aa, Arabidopsis thaliana; identical to SEQ ID NO: 105230
  peptide (1)..(156): Ceres Seq. ID no. 13616732

SEQ ID NO: 116470 - protein, 152 aa, Arabidopsis thaliana; identical to SEQ ID NO: 105231
  peptide (1)..(152): Ceres Seq. ID no. 13616733

SEQ ID NO: 116471 - DNA, 1650 bp, Arabidopsis thaliana; identical to SEQ ID NO: 105232
  misc_feature (1)..(1650): Ceres Seq. ID no. 13616757
  misc_feature (1)..(1650): Ortholog of  Ceres SEQ ID NO 13597574 as cited in SEQ ID NO 64677
  misc_feature (1)..(1650): Ortholog of  Ceres SEQ ID NO 13597843 as cited in SEQ ID NO 64850
  misc_feature (1)..(1650): Ortholog of  Ceres SEQ ID NO 13597678 as cited in SEQ ID NO 65375
  misc_feature (1)..(1650): Ortholog of  Ceres SEQ ID NO 13596180 as cited in SEQ ID NO 67941
  misc_feature (1)..(1650): Ortholog of  Ceres SEQ ID NO 13591190 as cited in SEQ ID NO 68044
  misc_feature (1)..(1650): Ortholog of  Ceres SEQ ID NO 13595961 as cited in SEQ ID NO 68223

SEQ ID NO: 116472 - protein, 359 aa, Arabidopsis thaliana; identical to SEQ ID NO: 49769
  peptide (1)..(359): Ceres Seq. ID no. 13616758

SEQ ID NO: 116473 - protein, 354 aa, Arabidopsis thaliana; identical to SEQ ID NO: 49770
  peptide (1)..(354): Ceres Seq. ID no. 13616759

SEQ ID NO: 116474 - protein, 341 aa, Arabidopsis thaliana; identical to SEQ ID NO: 105235
  peptide (1)..(341): Ceres Seq. ID no. 13616760

SEQ ID NO: 116475 - DNA, 1015 bp, Arabidopsis thaliana; identical to SEQ ID NO: 105236
  misc_feature (1)..(1015): Ceres Seq. ID no. 13616769
  misc_feature (1)..(1015): Ortholog of  Ceres SEQ ID NO 14304124 as cited in SEQ ID NO 56378
  misc_feature (1)..(1015): Ortholog of  Ceres SEQ ID NO 12585331 as cited in SEQ ID NO 62912
  misc_feature (1)..(1015): Ortholog of  Ceres SEQ ID NO 13654964 as cited in SEQ ID NO 63176

SEQ ID NO: 116476 - protein, 256 aa, Arabidopsis thaliana; identical to SEQ ID NO: 29776
  peptide (1)..(256): Ceres Seq. ID no. 13616770

SEQ ID NO: 116477 - protein, 245 aa, Arabidopsis thaliana; identical to SEQ ID NO: 29777
  peptide (1)..(245): Ceres Seq. ID no. 13616771

SEQ ID NO: 116478 - protein, 230 aa, Arabidopsis thaliana; identical to SEQ ID NO: 29778
  peptide (1)..(230): Ceres Seq. ID no. 13616772

SEQ ID NO: 116479 - DNA, 2012 bp, Arabidopsis thaliana; identical to SEQ ID NO: 105240
  misc_feature (1)..(2012): Ceres Seq. ID no. 13616773
  misc_feature (1)..(2012): Ortholog of  Ceres SEQ ID NO 14304471 as cited in SEQ ID NO 53670

SEQ ID NO: 116480 - protein, 610 aa, Arabidopsis thaliana; identical to SEQ ID NO: 38740
  peptide (1)..(610): Ceres Seq. ID no. 13616774

SEQ ID NO: 116481 - DNA, 1690 bp, Arabidopsis thaliana; identical to SEQ ID NO: 105242
  misc_feature (1)..(1690): Ceres Seq. ID no. 13616775
  misc_feature (1)..(1690): Ortholog of  Ceres SEQ ID NO 13594345 as cited in SEQ ID NO 58043
  misc_feature (1)..(1690): Ortholog of  Ceres SEQ ID NO 12614112 as cited in SEQ ID NO 60891
  misc_feature (1)..(1690): Ortholog of  Ceres SEQ ID NO 13597574 as cited in SEQ ID NO 64677
  misc_feature (1)..(1690): Ortholog of  Ceres SEQ ID NO 13662880 as cited in SEQ ID NO 65422
  misc_feature (1)..(1690): Ortholog of  Ceres SEQ ID NO 12779098 as cited in SEQ ID NO 67698
  misc_feature (1)..(1690): Ortholog of  Ceres SEQ ID NO 13591190 as cited in SEQ ID NO 68044
  misc_feature (1)..(1690): Ortholog of  Ceres SEQ ID NO 13596089 as cited in SEQ ID NO 68373

SEQ ID NO: 116482 - protein, 479 aa, Arabidopsis thaliana; identical to SEQ ID NO: 23079
  peptide (1)..(479): Ceres Seq. ID no. 13616776

SEQ ID NO: 116483 - protein, 470 aa, Arabidopsis thaliana; identical to SEQ ID NO: 23080
  peptide (1)..(470): Ceres Seq. ID no. 13616777

SEQ ID NO: 116484 - protein, 430 aa, Arabidopsis thaliana; identical to SEQ ID NO: 23081
  peptide (1)..(430): Ceres Seq. ID no. 13616778

SEQ ID NO: 116485 - DNA, 726 bp, Arabidopsis thaliana; identical to SEQ ID NO: 105246
  misc_feature (1)..(726): Ceres Seq. ID no. 13616787
  misc_feature (1)..(726): Ortholog of  Ceres SEQ ID NO 12612244 as cited in SEQ ID NO 60140

SEQ ID NO: 116486 - protein, 194 aa, Arabidopsis thaliana; identical to SEQ ID NO: 105247
  peptide (1)..(194): Ceres Seq. ID no. 13616788

SEQ ID NO: 116487 - protein, 191 aa, Arabidopsis thaliana; identical to SEQ ID NO: 105248
  peptide (1)..(191): Ceres Seq. ID no. 13616789

SEQ ID NO: 116488 - protein, 147 aa, Arabidopsis thaliana; identical to SEQ ID NO: 35359
  peptide (1)..(147): Ceres Seq. ID no. 13616790

SEQ ID NO: 116489 - DNA, 1116 bp, Arabidopsis thaliana; identical to SEQ ID NO: 105250
  misc_feature (1)..(1116): Ceres Seq. ID no. 13616795
  misc_feature (1)..(1116): Ortholog of  Ceres SEQ ID NO 15177022 as cited in SEQ ID NO 57405
  misc_feature (1)..(1116): Ortholog of  Ceres SEQ ID NO 13597427 as cited in SEQ ID NO 64038

SEQ ID NO: 116490 - protein, 313 aa, Arabidopsis thaliana; identical to SEQ ID NO: 105251
  peptide (1)..(313): Ceres Seq. ID no. 13616796

SEQ ID NO: 116491 - protein, 296 aa, Arabidopsis thaliana; identical to SEQ ID NO: 105252
  peptide (1)..(296): Ceres Seq. ID no. 13616797

SEQ ID NO: 116492 - protein, 190 aa, Arabidopsis thaliana; identical to SEQ ID NO: 105253
  peptide (1)..(190): Ceres Seq. ID no. 13616798

SEQ ID NO: 116493 - DNA, 945 bp, Arabidopsis thaliana; identical to SEQ ID NO: 105254
  misc_feature (1)..(945): Ceres Seq. ID no. 13616803
  misc_feature (1)..(945): Ortholog of  Ceres SEQ ID NO 13661756 as cited in SEQ ID NO 61398

SEQ ID NO: 116494 - protein, 222 aa, Arabidopsis thaliana; identical to SEQ ID NO: 105255
  peptide (1)..(222): Ceres Seq. ID no. 13616804

SEQ ID NO: 116495 - protein, 218 aa, Arabidopsis thaliana; identical to SEQ ID NO: 105256
  peptide (1)..(218): Ceres Seq. ID no. 13616805

SEQ ID NO: 116496 - protein, 214 aa, Arabidopsis thaliana; identical to SEQ ID NO: 105257
  peptide (1)..(214): Ceres Seq. ID no. 13616806

SEQ ID NO: 116497 - DNA, 1052 bp, Arabidopsis thaliana; identical to SEQ ID NO: 105258
  misc_feature (1)..(1052): Ceres Seq. ID no. 13616807
  misc_feature (1)..(1052): Ortholog of  Ceres SEQ ID NO 13658132 as cited in SEQ ID NO 66758

SEQ ID NO: 116498 - protein, 296 aa, Arabidopsis thaliana; identical to SEQ ID NO: 105259
  peptide (1)..(296): Ceres Seq. ID no. 13616808

SEQ ID NO: 116499 - protein, 289 aa, Arabidopsis thaliana; identical to SEQ ID NO: 105260
  peptide (1)..(289): Ceres Seq. ID no. 13616809

SEQ ID NO: 116500 - protein, 237 aa, Arabidopsis thaliana; identical to SEQ ID NO: 105261
  peptide (1)..(237): Ceres Seq. ID no. 13616810

SEQ ID NO: 116501 - DNA, 1176 bp, Arabidopsis thaliana; identical to SEQ ID NO: 105262
  misc_feature (1)..(1176): Ceres Seq. ID no. 13616816
  misc_feature (1)..(1176): Ortholog of  Ceres SEQ ID NO 14314782 as cited in SEQ ID NO 56830

SEQ ID NO: 116502 - protein, 336 aa, Arabidopsis thaliana; identical to SEQ ID NO: 22118
  peptide (1)..(336): Ceres Seq. ID no. 13616817

SEQ ID NO: 116503 - DNA, 1303 bp, Arabidopsis thaliana; identical to SEQ ID NO: 105264
  misc_feature (1)..(1303): Ceres Seq. ID no. 13616825
  misc_feature (1)..(1303): Ortholog of  Ceres SEQ ID NO 13655302 as cited in SEQ ID NO 63307
  misc_feature (1)..(1303): Ortholog of  Ceres SEQ ID NO 13597380 as cited in SEQ ID NO 64054
  misc_feature (1)..(1303): Ortholog of  Ceres SEQ ID NO 12625474 as cited in SEQ ID NO 64169
  misc_feature (1)..(1303): Ortholog of  Ceres SEQ ID NO 13597502 as cited in SEQ ID NO 64681
  misc_feature (1)..(1303): Ortholog of  Ceres SEQ ID NO 13600397 as cited in SEQ ID NO 0

SEQ ID NO: 116504 - protein, 364 aa, Arabidopsis thaliana; identical to SEQ ID NO: 105265
  peptide (1)..(364): Ceres Seq. ID no. 13616826

SEQ ID NO: 116505 - protein, 350 aa, Arabidopsis thaliana; identical to SEQ ID NO: 105266
  peptide (1)..(350): Ceres Seq. ID no. 13616827

SEQ ID NO: 116506 - protein, 335 aa, Arabidopsis thaliana; identical to SEQ ID NO: 105267
  peptide (1)..(335): Ceres Seq. ID no. 13616828

SEQ ID NO: 116507 - DNA, 1040 bp, Arabidopsis thaliana; identical to SEQ ID NO: 105268
  misc_feature (1)..(1040): Ceres Seq. ID no. 13616832
  misc_feature (1)..(1040): Ortholog of  Ceres SEQ ID NO 15176333 as cited in SEQ ID NO 52787
  misc_feature (1)..(1040): Ortholog of  Ceres SEQ ID NO 15170403 as cited in SEQ ID NO 53457
  misc_feature (1)..(1040): Ortholog of  Ceres SEQ ID NO 14303479 as cited in SEQ ID NO 54254
  misc_feature (1)..(1040): Ortholog of  Ceres SEQ ID NO 14312047 as cited in SEQ ID NO 55656
  misc_feature (1)..(1040): Ortholog of  Ceres SEQ ID NO 13660872 as cited in SEQ ID NO 60830
  misc_feature (1)..(1040): Ortholog of  Ceres SEQ ID NO 12616221 as cited in SEQ ID NO 63291
  misc_feature (1)..(1040): Ortholog of  Ceres SEQ ID NO 14302355 as cited in SEQ ID NO 65830

SEQ ID NO: 116508 - protein, 272 aa, Arabidopsis thaliana; identical to SEQ ID NO: 105269
  peptide (1)..(272): Ceres Seq. ID no. 13616833

SEQ ID NO: 116509 - protein, 253 aa, Arabidopsis thaliana; identical to SEQ ID NO: 23480
  peptide (1)..(253): Ceres Seq. ID no. 13616834

SEQ ID NO: 116510 - protein, 252 aa, Arabidopsis thaliana; identical to SEQ ID NO: 23481
  peptide (1)..(252): Ceres Seq. ID no. 13616835

SEQ ID NO: 116511 - DNA, 1527 bp, Arabidopsis thaliana; identical to SEQ ID NO: 105272
  misc_feature (1)..(1527): Ceres Seq. ID no. 13616844
  misc_feature (1)..(1527): Ortholog of  Ceres SEQ ID NO 13638402 as cited in SEQ ID NO 60300
  misc_feature (1)..(1527): Ortholog of  Ceres SEQ ID NO 12618349 as cited in SEQ ID NO 64838

SEQ ID NO: 116512 - protein, 336 aa, Arabidopsis thaliana; identical to SEQ ID NO: 29083
  peptide (1)..(336): Ceres Seq. ID no. 13616845

SEQ ID NO: 116513 - protein, 331 aa, Arabidopsis thaliana; identical to SEQ ID NO: 29084
  peptide (1)..(331): Ceres Seq. ID no. 13616846

SEQ ID NO: 116514 - protein, 311 aa, Arabidopsis thaliana; identical to SEQ ID NO: 29085
  peptide (1)..(311): Ceres Seq. ID no. 13616847

SEQ ID NO: 116515 - DNA, 1168 bp, Arabidopsis thaliana; identical to SEQ ID NO: 105276
  misc_feature (1)..(1168): Ceres Seq. ID no. 13616858
  misc_feature (1)..(1168): Ortholog of  Ceres SEQ ID NO 13582619 as cited in SEQ ID NO 56520
  misc_feature (1)..(1168): Ortholog of  Ceres SEQ ID NO 13660872 as cited in SEQ ID NO 60830
  misc_feature (1)..(1168): Ortholog of  Ceres SEQ ID NO 12616221 as cited in SEQ ID NO 63291

SEQ ID NO: 116516 - protein, 324 aa, Arabidopsis thaliana; identical to SEQ ID NO: 42739
  peptide (1)..(324): Ceres Seq. ID no. 13616859

SEQ ID NO: 116517 - protein, 320 aa, Arabidopsis thaliana; identical to SEQ ID NO: 42740
  peptide (1)..(320): Ceres Seq. ID no. 13616860

SEQ ID NO: 116518 - protein, 316 aa, Arabidopsis thaliana; identical to SEQ ID NO: 42741
  peptide (1)..(316): Ceres Seq. ID no. 13616861

SEQ ID NO: 116519 - DNA, 578 bp, Arabidopsis thaliana; identical to SEQ ID NO: 105280
  misc_feature (1)..(578): Ceres Seq. ID no. 13616866
  misc_feature (1)..(578): Ortholog of  Ceres SEQ ID NO 12557027 as cited in SEQ ID NO 140

SEQ ID NO: 116520 - protein, 136 aa, Arabidopsis thaliana; identical to SEQ ID NO: 105281
  peptide (1)..(136): Ceres Seq. ID no. 13616867

SEQ ID NO: 116521 - protein, 104 aa, Arabidopsis thaliana; identical to SEQ ID NO: 24149
  peptide (1)..(104): Ceres Seq. ID no. 13616868

SEQ ID NO: 116522 - DNA, 2057 bp, Arabidopsis thaliana; identical to SEQ ID NO: 105283
  misc_feature (1)..(2057): Ceres Seq. ID no. 13616877
  misc_feature (1)..(2057): Ortholog of  Ceres SEQ ID NO 12460981 as cited in SEQ ID NO 65146

SEQ ID NO: 116523 - protein, 573 aa, Arabidopsis thaliana; identical to SEQ ID NO: 39018
  peptide (1)..(573): Ceres Seq. ID no. 13616878

SEQ ID NO: 116524 - protein, 298 aa, Arabidopsis thaliana; identical to SEQ ID NO: 39019
  peptide (1)..(298): Ceres Seq. ID no. 13616879

SEQ ID NO: 116525 - DNA, 642 bp, Arabidopsis thaliana; identical to SEQ ID NO: 105286
  misc_feature (1)..(642): Ceres Seq. ID no. 13616880
  misc_feature (1)..(642): Ortholog of  Ceres SEQ ID NO 15179051 as cited in SEQ ID NO 0

SEQ ID NO: 116526 - protein, 134 aa, Arabidopsis thaliana; identical to SEQ ID NO: 36079
  peptide (1)..(134): Ceres Seq. ID no. 13616881

SEQ ID NO: 116527 - protein, 122 aa, Arabidopsis thaliana; identical to SEQ ID NO: 36080
  peptide (1)..(122): Ceres Seq. ID no. 13616882

SEQ ID NO: 116528 - protein, 118 aa, Arabidopsis thaliana; identical to SEQ ID NO: 36081
  peptide (1)..(118): Ceres Seq. ID no. 13616883

SEQ ID NO: 116529 - DNA, 1135 bp, Arabidopsis thaliana; identical to SEQ ID NO: 105290
  misc_feature (1)..(1135): Ceres Seq. ID no. 13616890
  misc_feature (1)..(1135): Ortholog of  Ceres SEQ ID NO 14307300 as cited in SEQ ID NO 54107

SEQ ID NO: 116530 - protein, 165 aa, Arabidopsis thaliana; identical to SEQ ID NO: 105291
  peptide (1)..(165): Ceres Seq. ID no. 13616891

SEQ ID NO: 116531 - protein, 155 aa, Arabidopsis thaliana; identical to SEQ ID NO: 105292
  peptide (1)..(155): Ceres Seq. ID no. 13616892

SEQ ID NO: 116532 - protein, 111 aa, Arabidopsis thaliana; identical to SEQ ID NO: 105293
  peptide (1)..(111): Ceres Seq. ID no. 13616893

SEQ ID NO: 116533 - DNA, 1307 bp, Arabidopsis thaliana; identical to SEQ ID NO: 105294
  misc_feature (1)..(1307): Ceres Seq. ID no. 13616898
  misc_feature (1)..(1307): Ortholog of  Ceres SEQ ID NO 13596048 as cited in SEQ ID NO 68476
  misc_feature (1)..(1307): Ortholog of  Ceres SEQ ID NO 12589137 as cited in SEQ ID NO 0

SEQ ID NO: 116534 - protein, 355 aa, Arabidopsis thaliana; identical to SEQ ID NO: 23334
  peptide (1)..(355): Ceres Seq. ID no. 13616899

SEQ ID NO: 116535 - protein, 344 aa, Arabidopsis thaliana; identical to SEQ ID NO: 23335
  peptide (1)..(344): Ceres Seq. ID no. 13616900

SEQ ID NO: 116536 - protein, 183 aa, Arabidopsis thaliana; identical to SEQ ID NO: 23336
  peptide (1)..(183): Ceres Seq. ID no. 13616901

SEQ ID NO: 116537 - DNA, 953 bp, Arabidopsis thaliana; identical to SEQ ID NO: 105298
  misc_feature (1)..(953): Ceres Seq. ID no. 13616906
  misc_feature (1)..(953): Ortholog of  Ceres SEQ ID NO 13597839 as cited in SEQ ID NO 64260

SEQ ID NO: 116538 - protein, 203 aa, Arabidopsis thaliana; identical to SEQ ID NO: 41284
  peptide (1)..(203): Ceres Seq. ID no. 13616907

SEQ ID NO: 116539 - protein, 196 aa, Arabidopsis thaliana; identical to SEQ ID NO: 41285
  peptide (1)..(196): Ceres Seq. ID no. 13616908

SEQ ID NO: 116540 - protein, 156 aa, Arabidopsis thaliana; identical to SEQ ID NO: 41286
  peptide (1)..(156): Ceres Seq. ID no. 13616909

SEQ ID NO: 116541 - DNA, 1005 bp, Arabidopsis thaliana; identical to SEQ ID NO: 105302
  misc_feature (1)..(1005): Ceres Seq. ID no. 13616934
  misc_feature (1)..(1005): Ortholog of  Ceres SEQ ID NO 12624943 as cited in SEQ ID NO 67802

SEQ ID NO: 116542 - protein, 196 aa, Arabidopsis thaliana; identical to SEQ ID NO: 34750
  peptide (1)..(196): Ceres Seq. ID no. 13616935

SEQ ID NO: 116543 - protein, 136 aa, Arabidopsis thaliana; identical to SEQ ID NO: 34751
  peptide (1)..(136): Ceres Seq. ID no. 13616936

SEQ ID NO: 116544 - DNA, 1294 bp, Arabidopsis thaliana; identical to SEQ ID NO: 105305
  misc_feature (1)..(1294): Ceres Seq. ID no. 13616941
  misc_feature (1)..(1294): Ortholog of  Ceres SEQ ID NO 13638746 as cited in SEQ ID NO 59296
  misc_feature (1)..(1294): Ortholog of  Ceres SEQ ID NO 13596474 as cited in SEQ ID NO 62169
  misc_feature (1)..(1294): Ortholog of  Ceres SEQ ID NO 13598714 as cited in SEQ ID NO 62656
  misc_feature (1)..(1294): Ortholog of  Ceres SEQ ID NO 13596969 as cited in SEQ ID NO 63375
  misc_feature (1)..(1294): Ortholog of  Ceres SEQ ID NO 14302434 as cited in SEQ ID NO 63410
  misc_feature (1)..(1294): Ortholog of  Ceres SEQ ID NO 15225685 as cited in SEQ ID NO 63616
  misc_feature (1)..(1294): Ortholog of  Ceres SEQ ID NO 13597519 as cited in SEQ ID NO 64759
  misc_feature (1)..(1294): Ortholog of  Ceres SEQ ID NO 13587054 as cited in SEQ ID NO 0

SEQ ID NO: 116545 - protein, 335 aa, Arabidopsis thaliana; identical to SEQ ID NO: 24060
  peptide (1)..(335): Ceres Seq. ID no. 13616942

SEQ ID NO: 116546 - DNA, 1351 bp, Arabidopsis thaliana; identical to SEQ ID NO: 105307
  misc_feature (1)..(1351): Ceres Seq. ID no. 13616943
  misc_feature (1)..(1351): Ortholog of  Ceres SEQ ID NO 13638746 as cited in SEQ ID NO 59296
  misc_feature (1)..(1351): Ortholog of  Ceres SEQ ID NO 14314050 as cited in SEQ ID NO 59952
  misc_feature (1)..(1351): Ortholog of  Ceres SEQ ID NO 13596474 as cited in SEQ ID NO 62169
  misc_feature (1)..(1351): Ortholog of  Ceres SEQ ID NO 13598714 as cited in SEQ ID NO 62656
  misc_feature (1)..(1351): Ortholog of  Ceres SEQ ID NO 13596969 as cited in SEQ ID NO 63375
  misc_feature (1)..(1351): Ortholog of  Ceres SEQ ID NO 15225685 as cited in SEQ ID NO 63616
  misc_feature (1)..(1351): Ortholog of  Ceres SEQ ID NO 13597519 as cited in SEQ ID NO 64759
  misc_feature (1)..(1351): Ortholog of  Ceres SEQ ID NO 13587054 as cited in SEQ ID NO 0

SEQ ID NO: 116547 - protein, 358 aa, Arabidopsis thaliana; identical to SEQ ID NO: 27751
  peptide (1)..(358): Ceres Seq. ID no. 13616944

SEQ ID NO: 116548 - DNA, 1446 bp, Arabidopsis thaliana; identical to SEQ ID NO: 105309
  misc_feature (1)..(1446): Ceres Seq. ID no. 13616945
  misc_feature (1)..(1446): Ortholog of  Ceres SEQ ID NO 14314480 as cited in SEQ ID NO 52362
  misc_feature (1)..(1446): Ortholog of  Ceres SEQ ID NO 13593854 as cited in SEQ ID NO 53403
  misc_feature (1)..(1446): Ortholog of  Ceres SEQ ID NO 12581680 as cited in SEQ ID NO 55019

SEQ ID NO: 116549 - protein, 393 aa, Arabidopsis thaliana; identical to SEQ ID NO: 40665
  peptide (1)..(393): Ceres Seq. ID no. 13616946

SEQ ID NO: 116550 - protein, 386 aa, Arabidopsis thaliana; identical to SEQ ID NO: 40666
  peptide (1)..(386): Ceres Seq. ID no. 13616947

SEQ ID NO: 116551 - protein, 378 aa, Arabidopsis thaliana; identical to SEQ ID NO: 40667
  peptide (1)..(378): Ceres Seq. ID no. 13616948

SEQ ID NO: 116552 - DNA, 1118 bp, Arabidopsis thaliana; identical to SEQ ID NO: 105313
  misc_feature (1)..(1118): Ceres Seq. ID no. 13616953
  misc_feature (1)..(1118): Ortholog of  Ceres SEQ ID NO 13597538 as cited in SEQ ID NO 64966

SEQ ID NO: 116553 - protein, 240 aa, Arabidopsis thaliana; identical to SEQ ID NO: 105314
  peptide (1)..(240): Ceres Seq. ID no. 13616954

SEQ ID NO: 116554 - protein, 213 aa, Arabidopsis thaliana; identical to SEQ ID NO: 105315
  peptide (1)..(213): Ceres Seq. ID no. 13616955

SEQ ID NO: 116555 - protein, 168 aa, Arabidopsis thaliana; identical to SEQ ID NO: 105316
  peptide (1)..(168): Ceres Seq. ID no. 13616956

SEQ ID NO: 116556 - DNA, 1236 bp, Arabidopsis thaliana; identical to SEQ ID NO: 105317
  misc_feature (1)..(1236): Ceres Seq. ID no. 13616961
  misc_feature (1)..(1236): Ortholog of  Ceres SEQ ID NO 12614972 as cited in SEQ ID NO 61986
  misc_feature (1)..(1236): Ortholog of  Ceres SEQ ID NO 12625706 as cited in SEQ ID NO 64144
  misc_feature (1)..(1236): Ortholog of  Ceres SEQ ID NO 13584933 as cited in SEQ ID NO 65009
  misc_feature (1)..(1236): Ortholog of  Ceres SEQ ID NO 12634984 as cited in SEQ ID NO 0
  misc_feature (1)..(1236): Ortholog of  Ceres SEQ ID NO 13599377 as cited in SEQ ID NO 0

SEQ ID NO: 116557 - protein, 347 aa, Arabidopsis thaliana; identical to SEQ ID NO: 105318
  peptide (1)..(347): Ceres Seq. ID no. 13616962

SEQ ID NO: 116558 - protein, 340 aa, Arabidopsis thaliana; identical to SEQ ID NO: 72686
  peptide (1)..(340): Ceres Seq. ID no. 13616963

SEQ ID NO: 116559 - protein, 313 aa, Arabidopsis thaliana; identical to SEQ ID NO: 72687
  peptide (1)..(313): Ceres Seq. ID no. 13616964

SEQ ID NO: 116560 - DNA, 961 bp, Arabidopsis thaliana; identical to SEQ ID NO: 105321
  misc_feature (1)..(961): Ceres Seq. ID no. 13616965
  misc_feature (1)..(961): Ortholog of  Ceres SEQ ID NO 13594296 as cited in SEQ ID NO 57764

SEQ ID NO: 116561 - protein, 235 aa, Arabidopsis thaliana; identical to SEQ ID NO: 30350
  peptide (1)..(235): Ceres Seq. ID no. 13616966

SEQ ID NO: 116562 - protein, 174 aa, Arabidopsis thaliana; identical to SEQ ID NO: 30351
  peptide (1)..(174): Ceres Seq. ID no. 13616967

SEQ ID NO: 116563 - DNA, 1579 bp, Arabidopsis thaliana; identical to SEQ ID NO: 105324
  misc_feature (1)..(1579): Ceres Seq. ID no. 13616968
  misc_feature (1)..(1579): Ortholog of  Ceres SEQ ID NO 13662245 as cited in SEQ ID NO 62708

SEQ ID NO: 116564 - protein, 449 aa, Arabidopsis thaliana; identical to SEQ ID NO: 29838
  peptide (1)..(449): Ceres Seq. ID no. 13616969

SEQ ID NO: 116565 - protein, 439 aa, Arabidopsis thaliana; identical to SEQ ID NO: 29839
  peptide (1)..(439): Ceres Seq. ID no. 13616970

SEQ ID NO: 116566 - protein, 347 aa, Arabidopsis thaliana; identical to SEQ ID NO: 29840
  peptide (1)..(347): Ceres Seq. ID no. 13616971

SEQ ID NO: 116567 - DNA, 1509 bp, Arabidopsis thaliana; identical to SEQ ID NO: 105328
  misc_feature (1)..(1509): Ceres Seq. ID no. 13616972
  misc_feature (1)..(1509): Ortholog of  Ceres SEQ ID NO 15177652 as cited in SEQ ID NO 56858

SEQ ID NO: 116568 - protein, 457 aa, Arabidopsis thaliana; identical to SEQ ID NO: 30323
  peptide (1)..(457): Ceres Seq. ID no. 13616973

SEQ ID NO: 116569 - protein, 450 aa, Arabidopsis thaliana; identical to SEQ ID NO: 30324
  peptide (1)..(450): Ceres Seq. ID no. 13616974

SEQ ID NO: 116570 - protein, 445 aa, Arabidopsis thaliana; identical to SEQ ID NO: 30325
  peptide (1)..(445): Ceres Seq. ID no. 13616975

SEQ ID NO: 116571 - DNA, 891 bp, Arabidopsis thaliana; identical to SEQ ID NO: 105332
  misc_feature (1)..(891): Ceres Seq. ID no. 13616980
  misc_feature (1)..(891): Ortholog of  Ceres SEQ ID NO 12627129 as cited in SEQ ID NO 68657
  misc_feature (1)..(891): Ortholog of  Ceres SEQ ID NO 15179538 as cited in SEQ ID NO 0

SEQ ID NO: 116572 - protein, 216 aa, Arabidopsis thaliana; identical to SEQ ID NO: 35333
  peptide (1)..(216): Ceres Seq. ID no. 13616981

SEQ ID NO: 116573 - DNA, 1279 bp, Arabidopsis thaliana; identical to SEQ ID NO: 105334
  misc_feature (1)..(1279): Ceres Seq. ID no. 13617001
  misc_feature (1)..(1279): Ortholog of  Ceres SEQ ID NO 13647847 as cited in SEQ ID NO 20430
  misc_feature (1)..(1279): Ortholog of  Ceres SEQ ID NO 15171696 as cited in SEQ ID NO 59997

SEQ ID NO: 116574 - protein, 337 aa, Arabidopsis thaliana; identical to SEQ ID NO: 105335
  peptide (1)..(337): Ceres Seq. ID no. 13617002

SEQ ID NO: 116575 - protein, 315 aa, Arabidopsis thaliana; identical to SEQ ID NO: 105336
  peptide (1)..(315): Ceres Seq. ID no. 13617003

SEQ ID NO: 116576 - protein, 270 aa, Arabidopsis thaliana; identical to SEQ ID NO: 105337
  peptide (1)..(270): Ceres Seq. ID no. 13617004

SEQ ID NO: 116577 - DNA, 1225 bp, Arabidopsis thaliana; identical to SEQ ID NO: 105338
  misc_feature (1)..(1225): Ceres Seq. ID no. 13617008
  misc_feature (1)..(1225): Ortholog of  Ceres SEQ ID NO 13596039 as cited in SEQ ID NO 62117

SEQ ID NO: 116578 - protein, 306 aa, Arabidopsis thaliana; identical to SEQ ID NO: 42947
  peptide (1)..(306): Ceres Seq. ID no. 13617009

SEQ ID NO: 116579 - protein, 230 aa, Arabidopsis thaliana; identical to SEQ ID NO: 42948
  peptide (1)..(230): Ceres Seq. ID no. 13617010

SEQ ID NO: 116580 - protein, 154 aa, Arabidopsis thaliana; identical to SEQ ID NO: 42949
  peptide (1)..(154): Ceres Seq. ID no. 13617011

SEQ ID NO: 116581 - DNA, 1560 bp, Arabidopsis thaliana; identical to SEQ ID NO: 105342
  misc_feature (1)..(1560): Ceres Seq. ID no. 13617012
  misc_feature (1)..(1560): Ortholog of  Ceres SEQ ID NO 13654989 as cited in SEQ ID NO 63117
  misc_feature (1)..(1560): Ortholog of  Ceres SEQ ID NO 13655640 as cited in SEQ ID NO 63844
  misc_feature (1)..(1560): Ortholog of  Ceres SEQ ID NO 13584744 as cited in SEQ ID NO 69137

SEQ ID NO: 116582 - protein, 420 aa, Arabidopsis thaliana; identical to SEQ ID NO: 105343
  peptide (1)..(420): Ceres Seq. ID no. 13617013

SEQ ID NO: 116583 - protein, 362 aa, Arabidopsis thaliana; identical to SEQ ID NO: 105344
  peptide (1)..(362): Ceres Seq. ID no. 13617014

SEQ ID NO: 116584 - protein, 335 aa, Arabidopsis thaliana; identical to SEQ ID NO: 105345
  peptide (1)..(335): Ceres Seq. ID no. 13617015

SEQ ID NO: 116585 - DNA, 1101 bp, Arabidopsis thaliana; identical to SEQ ID NO: 105346
  misc_feature (1)..(1101): Ceres Seq. ID no. 13617031
  misc_feature (1)..(1101): Ortholog of  Ceres SEQ ID NO 13656436 as cited in SEQ ID NO 69154

SEQ ID NO: 116586 - protein, 216 aa, Arabidopsis thaliana; identical to SEQ ID NO: 26592
  peptide (1)..(216): Ceres Seq. ID no. 13617032

SEQ ID NO: 116587 - protein, 128 aa, Arabidopsis thaliana; identical to SEQ ID NO: 26593
  peptide (1)..(128): Ceres Seq. ID no. 13617033

SEQ ID NO: 116588 - DNA, 1361 bp, Arabidopsis thaliana; identical to SEQ ID NO: 105349
  misc_feature (1)..(1361): Ceres Seq. ID no. 13617034
  misc_feature (1)..(1361): Ortholog of  Ceres SEQ ID NO 14314037 as cited in SEQ ID NO 52244
  misc_feature (1)..(1361): Ortholog of  Ceres SEQ ID NO 13661419 as cited in SEQ ID NO 61673

SEQ ID NO: 116589 - protein, 359 aa, Arabidopsis thaliana; identical to SEQ ID NO: 29103
  peptide (1)..(359): Ceres Seq. ID no. 13617035

SEQ ID NO: 116590 - protein, 242 aa, Arabidopsis thaliana; identical to SEQ ID NO: 29104
  peptide (1)..(242): Ceres Seq. ID no. 13617036

SEQ ID NO: 116591 - protein, 223 aa, Arabidopsis thaliana; identical to SEQ ID NO: 29105
  peptide (1)..(223): Ceres Seq. ID no. 13617037

SEQ ID NO: 116592 - DNA, 1252 bp, Arabidopsis thaliana; identical to SEQ ID NO: 105353
  misc_feature (1)..(1252): Ceres Seq. ID no. 13617046
  misc_feature (1)..(1252): Ortholog of  Ceres SEQ ID NO 15171279 as cited in SEQ ID NO 51378
  misc_feature (1)..(1252): Ortholog of  Ceres SEQ ID NO 13596816 as cited in SEQ ID NO 62287

SEQ ID NO: 116593 - protein, 306 aa, Arabidopsis thaliana; identical to SEQ ID NO: 105354
  peptide (1)..(306): Ceres Seq. ID no. 13617047

SEQ ID NO: 116594 - protein, 277 aa, Arabidopsis thaliana; identical to SEQ ID NO: 105355
  peptide (1)..(277): Ceres Seq. ID no. 13617048

SEQ ID NO: 116595 - protein, 276 aa, Arabidopsis thaliana; identical to SEQ ID NO: 105356
  peptide (1)..(276): Ceres Seq. ID no. 13617049

SEQ ID NO: 116596 - DNA, 1837 bp, Arabidopsis thaliana; identical to SEQ ID NO: 105357
  misc_feature (1)..(1837): Ceres Seq. ID no. 13617057
  misc_feature (1)..(1837): Ortholog of  Ceres SEQ ID NO 13663419 as cited in SEQ ID NO 66561

SEQ ID NO: 116597 - protein, 484 aa, Arabidopsis thaliana; identical to SEQ ID NO: 105358
  peptide (1)..(484): Ceres Seq. ID no. 13617058

SEQ ID NO: 116598 - protein, 479 aa, Arabidopsis thaliana; identical to SEQ ID NO: 105359
  peptide (1)..(479): Ceres Seq. ID no. 13617059

SEQ ID NO: 116599 - protein, 475 aa, Arabidopsis thaliana; identical to SEQ ID NO: 105360
  peptide (1)..(475): Ceres Seq. ID no. 13617060

SEQ ID NO: 116600 - DNA, 1472 bp, Arabidopsis thaliana; identical to SEQ ID NO: 105361
  misc_feature (1)..(1472): Ceres Seq. ID no. 13617061
  misc_feature (1)..(1472): Ortholog of  Ceres SEQ ID NO 14316017 as cited in SEQ ID NO 67028
  misc_feature (1)..(1472): Ortholog of  Ceres SEQ ID NO 15177500 as cited in SEQ ID NO 0

SEQ ID NO: 116601 - protein, 403 aa, Arabidopsis thaliana; identical to SEQ ID NO: 26972
  peptide (1)..(403): Ceres Seq. ID no. 13617062

SEQ ID NO: 116602 - protein, 394 aa, Arabidopsis thaliana; identical to SEQ ID NO: 26973
  peptide (1)..(394): Ceres Seq. ID no. 13617063

SEQ ID NO: 116603 - protein, 305 aa, Arabidopsis thaliana; identical to SEQ ID NO: 26974
  peptide (1)..(305): Ceres Seq. ID no. 13617064

SEQ ID NO: 116604 - DNA, 1281 bp, Arabidopsis thaliana; identical to SEQ ID NO: 105365
  misc_feature (1)..(1281): Ceres Seq. ID no. 13617065
  misc_feature (1)..(1281): Ortholog of  Ceres SEQ ID NO 13584217 as cited in SEQ ID NO 64024
  misc_feature (1)..(1281): Ortholog of  Ceres SEQ ID NO 14316021 as cited in SEQ ID NO 67130

SEQ ID NO: 116605 - protein, 329 aa, Arabidopsis thaliana; identical to SEQ ID NO: 27334
  peptide (1)..(329): Ceres Seq. ID no. 13617066

SEQ ID NO: 116606 - protein, 324 aa, Arabidopsis thaliana; identical to SEQ ID NO: 27335
  peptide (1)..(324): Ceres Seq. ID no. 13617067

SEQ ID NO: 116607 - protein, 274 aa, Arabidopsis thaliana; identical to SEQ ID NO: 27336
  peptide (1)..(274): Ceres Seq. ID no. 13617068

SEQ ID NO: 116608 - DNA, 922 bp, Arabidopsis thaliana; identical to SEQ ID NO: 105369
  misc_feature (1)..(922): Ceres Seq. ID no. 13617077
  misc_feature (1)..(922): Ortholog of  Ceres SEQ ID NO 15173936 as cited in SEQ ID NO 61736
  misc_feature (1)..(922): Ortholog of  Ceres SEQ ID NO 13596373 as cited in SEQ ID NO 67991

SEQ ID NO: 116609 - protein, 274 aa, Arabidopsis thaliana; identical to SEQ ID NO: 25824
  peptide (1)..(274): Ceres Seq. ID no. 13617078

SEQ ID NO: 116610 - protein, 263 aa, Arabidopsis thaliana; identical to SEQ ID NO: 25825
  peptide (1)..(263): Ceres Seq. ID no. 13617079

SEQ ID NO: 116611 - protein, 237 aa, Arabidopsis thaliana; identical to SEQ ID NO: 25826
  peptide (1)..(237): Ceres Seq. ID no. 13617080

SEQ ID NO: 116612 - DNA, 718 bp, Arabidopsis thaliana; identical to SEQ ID NO: 105373
  misc_feature (1)..(718): Ceres Seq. ID no. 13617085
  misc_feature (1)..(718): Ortholog of  Ceres SEQ ID NO 14309339 as cited in SEQ ID NO 0

SEQ ID NO: 116613 - protein, 191 aa, Arabidopsis thaliana; identical to SEQ ID NO: 105374
  peptide (1)..(191): Ceres Seq. ID no. 13617086

SEQ ID NO: 116614 - protein, 185 aa, Arabidopsis thaliana; identical to SEQ ID NO: 30509
  peptide (1)..(185): Ceres Seq. ID no. 13617087

SEQ ID NO: 116615 - DNA, 1793 bp, Arabidopsis thaliana; identical to SEQ ID NO: 105376
  misc_feature (1)..(1793): Ceres Seq. ID no. 13617088
  misc_feature (1)..(1793): Ortholog of  Ceres SEQ ID NO 14316451 as cited in SEQ ID NO 57956
  misc_feature (1)..(1793): Ortholog of  Ceres SEQ ID NO 15224799 as cited in SEQ ID NO 0

SEQ ID NO: 116616 - protein, 496 aa, Arabidopsis thaliana; identical to SEQ ID NO: 39043
  peptide (1)..(496): Ceres Seq. ID no. 13617089

SEQ ID NO: 116617 - protein, 404 aa, Arabidopsis thaliana; identical to SEQ ID NO: 39044
  peptide (1)..(404): Ceres Seq. ID no. 13617090

SEQ ID NO: 116618 - protein, 388 aa, Arabidopsis thaliana; identical to SEQ ID NO: 39045
  peptide (1)..(388): Ceres Seq. ID no. 13617091

SEQ ID NO: 116619 - DNA, 1154 bp, Arabidopsis thaliana; identical to SEQ ID NO: 105380
  misc_feature (1)..(1154): Ceres Seq. ID no. 13617108
  misc_feature (1)..(1154): Ortholog of  Ceres SEQ ID NO 14311981 as cited in SEQ ID NO 55703
  misc_feature (1)..(1154): Ortholog of  Ceres SEQ ID NO 15226227 as cited in SEQ ID NO 63433
  misc_feature (1)..(1154): Ortholog of  Ceres SEQ ID NO 13599003 as cited in SEQ ID NO 0

SEQ ID NO: 116620 - protein, 336 aa, Arabidopsis thaliana; identical to SEQ ID NO: 24416
  peptide (1)..(336): Ceres Seq. ID no. 13617109

SEQ ID NO: 116621 - protein, 292 aa, Arabidopsis thaliana; identical to SEQ ID NO: 24417
  peptide (1)..(292): Ceres Seq. ID no. 13617110

SEQ ID NO: 116622 - protein, 224 aa, Arabidopsis thaliana; identical to SEQ ID NO: 24418
  peptide (1)..(224): Ceres Seq. ID no. 13617111

SEQ ID NO: 116623 - DNA, 1013 bp, Arabidopsis thaliana; identical to SEQ ID NO: 105384
  misc_feature (1)..(1013): Ceres Seq. ID no. 13617112
  misc_feature (1)..(1013): Ortholog of  Ceres SEQ ID NO 13596097 as cited in SEQ ID NO 68421
  misc_feature (1)..(1013): Ortholog of  Ceres SEQ ID NO 13598439 as cited in SEQ ID NO 69016
  misc_feature (1)..(1013): Ortholog of  Ceres SEQ ID NO 13599524 as cited in SEQ ID NO 0

SEQ ID NO: 116624 - protein, 336 aa, Arabidopsis thaliana; identical to SEQ ID NO: 105385
  peptide (1)..(336): Ceres Seq. ID no. 13617113

SEQ ID NO: 116625 - protein, 317 aa, Arabidopsis thaliana; identical to SEQ ID NO: 22360
  peptide (1)..(317): Ceres Seq. ID no. 13617114

SEQ ID NO: 116626 - protein, 229 aa, Arabidopsis thaliana; identical to SEQ ID NO: 22361
  peptide (1)..(229): Ceres Seq. ID no. 13617115

SEQ ID NO: 116627 - DNA, 1553 bp, Arabidopsis thaliana; identical to SEQ ID NO: 105388
  misc_feature (1)..(1553): Ceres Seq. ID no. 13617122
  misc_feature (1)..(1553): Ortholog of  Ceres SEQ ID NO 14302216 as cited in SEQ ID NO 66456

SEQ ID NO: 116628 - protein, 336 aa, Arabidopsis thaliana; identical to SEQ ID NO: 105389
  peptide (1)..(336): Ceres Seq. ID no. 13617123

SEQ ID NO: 116629 - protein, 333 aa, Arabidopsis thaliana; identical to SEQ ID NO: 105390
  peptide (1)..(333): Ceres Seq. ID no. 13617124

SEQ ID NO: 116630 - protein, 277 aa, Arabidopsis thaliana; identical to SEQ ID NO: 105391
  peptide (1)..(277): Ceres Seq. ID no. 13617125

SEQ ID NO: 116631 - DNA, 618 bp, Arabidopsis thaliana; identical to SEQ ID NO: 105392
  misc_feature (1)..(618): Ceres Seq. ID no. 13617134
  misc_feature (1)..(618): Ortholog of  Ceres SEQ ID NO 12556948 as cited in SEQ ID NO 54

SEQ ID NO: 116632 - protein, 113 aa, Arabidopsis thaliana; identical to SEQ ID NO: 105393
  peptide (1)..(113): Ceres Seq. ID no. 13617135

SEQ ID NO: 116633 - protein, 80 aa, Arabidopsis thaliana; identical to SEQ ID NO: 30497
  peptide (1)..(80): Ceres Seq. ID no. 13617136

SEQ ID NO: 116634 - protein, 66 aa, Arabidopsis thaliana; identical to SEQ ID NO: 30498
  peptide (1)..(66): Ceres Seq. ID no. 13617137

SEQ ID NO: 116635 - DNA, 1226 bp, Arabidopsis thaliana; identical to SEQ ID NO: 105396
  misc_feature (1)..(1226): Ceres Seq. ID no. 13617138
  misc_feature (1)..(1226): Ortholog of  Ceres SEQ ID NO 12778054 as cited in SEQ ID NO 63215
  misc_feature (1)..(1226): Ortholog of  Ceres SEQ ID NO 14303185 as cited in SEQ ID NO 67203

SEQ ID NO: 116636 - protein, 290 aa, Arabidopsis thaliana; identical to SEQ ID NO: 36065
  peptide (1)..(290): Ceres Seq. ID no. 13617139

SEQ ID NO: 116637 - DNA, 613 bp, Arabidopsis thaliana; identical to SEQ ID NO: 105398
  misc_feature (1)..(613): Ceres Seq. ID no. 13617168
  misc_feature (1)..(613): Ortholog of  Ceres SEQ ID NO 13600689 as cited in SEQ ID NO 0
  misc_feature (1)..(613): Ortholog of  Ceres SEQ ID NO 15178120 as cited in SEQ ID NO 0

SEQ ID NO: 116638 - protein, 120 aa, Arabidopsis thaliana; identical to SEQ ID NO: 26669
  peptide (1)..(120): Ceres Seq. ID no. 13617169

SEQ ID NO: 116639 - protein, 82 aa, Arabidopsis thaliana; identical to SEQ ID NO: 26670
  peptide (1)..(82): Ceres Seq. ID no. 13617170

SEQ ID NO: 116640 - DNA, 1386 bp, Arabidopsis thaliana; identical to SEQ ID NO: 105401
  misc_feature (1)..(1386): Ceres Seq. ID no. 13617179
  misc_feature (1)..(1386): Ortholog of  Ceres SEQ ID NO 14314015 as cited in SEQ ID NO 56942
  misc_feature (1)..(1386): Ortholog of  Ceres SEQ ID NO 13596745 as cited in SEQ ID NO 60636

SEQ ID NO: 116641 - protein, 374 aa, Arabidopsis thaliana; identical to SEQ ID NO: 23709
  peptide (1)..(374): Ceres Seq. ID no. 13617180

SEQ ID NO: 116642 - protein, 326 aa, Arabidopsis thaliana; identical to SEQ ID NO: 23710
  peptide (1)..(326): Ceres Seq. ID no. 13617181

SEQ ID NO: 116643 - protein, 237 aa, Arabidopsis thaliana; identical to SEQ ID NO: 23711
  peptide (1)..(237): Ceres Seq. ID no. 13617182

SEQ ID NO: 116644 - DNA, 1507 bp, Arabidopsis thaliana; identical to SEQ ID NO: 105405
  misc_feature (1)..(1507): Ceres Seq. ID no. 13617187
  misc_feature (1)..(1507): Ortholog of  Ceres SEQ ID NO 15225627 as cited in SEQ ID NO 64323

SEQ ID NO: 116645 - protein, 433 aa, Arabidopsis thaliana; identical to SEQ ID NO: 105406
  peptide (1)..(433): Ceres Seq. ID no. 13617188

SEQ ID NO: 116646 - protein, 390 aa, Arabidopsis thaliana; identical to SEQ ID NO: 101249
  peptide (1)..(390): Ceres Seq. ID no. 13617189

SEQ ID NO: 116647 - protein, 373 aa, Arabidopsis thaliana; identical to SEQ ID NO: 23380
  peptide (1)..(373): Ceres Seq. ID no. 13617190

SEQ ID NO: 116648 - DNA, 1264 bp, Arabidopsis thaliana; identical to SEQ ID NO: 105409
  misc_feature (1)..(1264): Ceres Seq. ID no. 13617198
  misc_feature (1)..(1264): Ortholog of  Ceres SEQ ID NO 14316532 as cited in SEQ ID NO 57093
  misc_feature (1)..(1264): Ortholog of  Ceres SEQ ID NO 14301482 as cited in SEQ ID NO 63355

SEQ ID NO: 116649 - protein, 310 aa, Arabidopsis thaliana; identical to SEQ ID NO: 27837
  peptide (1)..(310): Ceres Seq. ID no. 13617199

SEQ ID NO: 116650 - protein, 229 aa, Arabidopsis thaliana; identical to SEQ ID NO: 27838
  peptide (1)..(229): Ceres Seq. ID no. 13617200

SEQ ID NO: 116651 - protein, 220 aa, Arabidopsis thaliana; identical to SEQ ID NO: 40038
  peptide (1)..(220): Ceres Seq. ID no. 13617201

SEQ ID NO: 116652 - DNA, 521 bp, Arabidopsis thaliana; identical to SEQ ID NO: 105413
  misc_feature (1)..(521): Ceres Seq. ID no. 13617202
  misc_feature (1)..(521): Ortholog of  Ceres SEQ ID NO 12610934 as cited in SEQ ID NO 55904
  misc_feature (1)..(521): Ortholog of  Ceres SEQ ID NO 13661786 as cited in SEQ ID NO 61478
  misc_feature (1)..(521): Ortholog of  Ceres SEQ ID NO 15177467 as cited in SEQ ID NO 0

SEQ ID NO: 116653 - protein, 148 aa, Arabidopsis thaliana; identical to SEQ ID NO: 105414
  peptide (1)..(148): Ceres Seq. ID no. 13617203

SEQ ID NO: 116654 - protein, 147 aa, Arabidopsis thaliana; identical to SEQ ID NO: 105415
  peptide (1)..(147): Ceres Seq. ID no. 13617204

SEQ ID NO: 116655 - protein, 89 aa, Arabidopsis thaliana; identical to SEQ ID NO: 105416
  peptide (1)..(89): Ceres Seq. ID no. 13617205

SEQ ID NO: 116656 - DNA, 964 bp, Arabidopsis thaliana; identical to SEQ ID NO: 105417
  misc_feature (1)..(964): Ceres Seq. ID no. 13617206
  misc_feature (1)..(964): Ortholog of  Ceres SEQ ID NO 14301994 as cited in SEQ ID NO 56653
  misc_feature (1)..(964): Ortholog of  Ceres SEQ ID NO 13595658 as cited in SEQ ID NO 59888
  misc_feature (1)..(964): Ortholog of  Ceres SEQ ID NO 13661330 as cited in SEQ ID NO 61614
  misc_feature (1)..(964): Ortholog of  Ceres SEQ ID NO 13596025 as cited in SEQ ID NO 62024
  misc_feature (1)..(964): Ortholog of  Ceres SEQ ID NO 13662324 as cited in SEQ ID NO 62162
  misc_feature (1)..(964): Ortholog of  Ceres SEQ ID NO 12625713 as cited in SEQ ID NO 64160
  misc_feature (1)..(964): Ortholog of  Ceres SEQ ID NO 14301782 as cited in SEQ ID NO 66788
  misc_feature (1)..(964): Ortholog of  Ceres SEQ ID NO 14302860 as cited in SEQ ID NO 67667
  misc_feature (1)..(964): Ortholog of  Ceres SEQ ID NO 15174373 as cited in SEQ ID NO 0

SEQ ID NO: 116657 - protein, 272 aa, Arabidopsis thaliana; identical to SEQ ID NO: 30204
  peptide (1)..(272): Ceres Seq. ID no. 13617207

SEQ ID NO: 116658 - protein, 264 aa, Arabidopsis thaliana; identical to SEQ ID NO: 30205
  peptide (1)..(264): Ceres Seq. ID no. 13617208

SEQ ID NO: 116659 - protein, 244 aa, Arabidopsis thaliana; identical to SEQ ID NO: 30206
  peptide (1)..(244): Ceres Seq. ID no. 13617209

SEQ ID NO: 116660 - DNA, 883 bp, Arabidopsis thaliana; identical to SEQ ID NO: 105421
  misc_feature (1)..(883): Ceres Seq. ID no. 13617214
  misc_feature (1)..(883): Ortholog of  Ceres SEQ ID NO 12619999 as cited in SEQ ID NO 66123
  misc_feature (1)..(883): Ortholog of  Ceres SEQ ID NO 13656436 as cited in SEQ ID NO 69154

SEQ ID NO: 116661 - protein, 233 aa, Arabidopsis thaliana; identical to SEQ ID NO: 41070
  peptide (1)..(233): Ceres Seq. ID no. 13617215

SEQ ID NO: 116662 - DNA, 1191 bp, Arabidopsis thaliana; identical to SEQ ID NO: 105423
  misc_feature (1)..(1191): Ceres Seq. ID no. 13617216
  misc_feature (1)..(1191): Ortholog of  Ceres SEQ ID NO 14313796 as cited in SEQ ID NO 54544

SEQ ID NO: 116663 - protein, 319 aa, Arabidopsis thaliana; identical to SEQ ID NO: 105424
  peptide (1)..(319): Ceres Seq. ID no. 13617217

SEQ ID NO: 116664 - protein, 291 aa, Arabidopsis thaliana; identical to SEQ ID NO: 105425
  peptide (1)..(291): Ceres Seq. ID no. 13617218

SEQ ID NO: 116665 - protein, 209 aa, Arabidopsis thaliana; identical to SEQ ID NO: 105426
  peptide (1)..(209): Ceres Seq. ID no. 13617219

SEQ ID NO: 116666 - DNA, 1621 bp, Arabidopsis thaliana; identical to SEQ ID NO: 105427
  misc_feature (1)..(1621): Ceres Seq. ID no. 13617220
  misc_feature (1)..(1621): Ortholog of  Ceres SEQ ID NO 15172174 as cited in SEQ ID NO 60481
  misc_feature (1)..(1621): Ortholog of  Ceres SEQ ID NO 13660287 as cited in SEQ ID NO 67316

SEQ ID NO: 116667 - protein, 481 aa, Arabidopsis thaliana; identical to SEQ ID NO: 105428
  peptide (1)..(481): Ceres Seq. ID no. 13617221

SEQ ID NO: 116668 - protein, 476 aa, Arabidopsis thaliana; identical to SEQ ID NO: 105429
  peptide (1)..(476): Ceres Seq. ID no. 13617222

SEQ ID NO: 116669 - protein, 459 aa, Arabidopsis thaliana; identical to SEQ ID NO: 105430
  peptide (1)..(459): Ceres Seq. ID no. 13617223

SEQ ID NO: 116670 - DNA, 1369 bp, Arabidopsis thaliana; identical to SEQ ID NO: 105431
  misc_feature (1)..(1369): Ceres Seq. ID no. 13617232
  misc_feature (1)..(1369): Ortholog of  Ceres SEQ ID NO 14310616 as cited in SEQ ID NO 55699
  misc_feature (1)..(1369): Ortholog of  Ceres SEQ ID NO 15173907 as cited in SEQ ID NO 62356
  misc_feature (1)..(1369): Ortholog of  Ceres SEQ ID NO 13596519 as cited in SEQ ID NO 62572
  misc_feature (1)..(1369): Ortholog of  Ceres SEQ ID NO 12625108 as cited in SEQ ID NO 68102

SEQ ID NO: 116671 - protein, 250 aa, Arabidopsis thaliana; identical to SEQ ID NO: 24990
  peptide (1)..(250): Ceres Seq. ID no. 13617233

SEQ ID NO: 116672 - protein, 236 aa, Arabidopsis thaliana; identical to SEQ ID NO: 24991
  peptide (1)..(236): Ceres Seq. ID no. 13617234

SEQ ID NO: 116673 - protein, 207 aa, Arabidopsis thaliana; identical to SEQ ID NO: 24992
  peptide (1)..(207): Ceres Seq. ID no. 13617235

SEQ ID NO: 116674 - DNA, 1217 bp, Arabidopsis thaliana; identical to SEQ ID NO: 105435
  misc_feature (1)..(1217): Ceres Seq. ID no. 13617236
  misc_feature (1)..(1217): Ortholog of  Ceres SEQ ID NO 14311981 as cited in SEQ ID NO 55703

SEQ ID NO: 116675 - protein, 337 aa, Arabidopsis thaliana; identical to SEQ ID NO: 105436
  peptide (1)..(337): Ceres Seq. ID no. 13617237

SEQ ID NO: 116676 - protein, 333 aa, Arabidopsis thaliana; identical to SEQ ID NO: 105437
  peptide (1)..(333): Ceres Seq. ID no. 13617238

SEQ ID NO: 116677 - protein, 313 aa, Arabidopsis thaliana; identical to SEQ ID NO: 105438
  peptide (1)..(313): Ceres Seq. ID no. 13617239

SEQ ID NO: 116678 - DNA, 1395 bp, Arabidopsis thaliana; identical to SEQ ID NO: 105439
  misc_feature (1)..(1395): Ceres Seq. ID no. 13617243
  misc_feature (1)..(1395): Ortholog of  Ceres SEQ ID NO 13595598 as cited in SEQ ID NO 56822
  misc_feature (1)..(1395): Ortholog of  Ceres SEQ ID NO 15171777 as cited in SEQ ID NO 57417
  misc_feature (1)..(1395): Ortholog of  Ceres SEQ ID NO 13655712 as cited in SEQ ID NO 63394
  misc_feature (1)..(1395): Ortholog of  Ceres SEQ ID NO 15179075 as cited in SEQ ID NO 0

SEQ ID NO: 116679 - protein, 294 aa, Arabidopsis thaliana; identical to SEQ ID NO: 26506
  peptide (1)..(294): Ceres Seq. ID no. 13617244

SEQ ID NO: 116680 - protein, 288 aa, Arabidopsis thaliana; identical to SEQ ID NO: 26507
  peptide (1)..(288): Ceres Seq. ID no. 13617245

SEQ ID NO: 116681 - protein, 280 aa, Arabidopsis thaliana; identical to SEQ ID NO: 26508
  peptide (1)..(280): Ceres Seq. ID no. 13617246

SEQ ID NO: 116682 - DNA, 2167 bp, Arabidopsis thaliana; identical to SEQ ID NO: 105443
  misc_feature (1)..(2167): Ceres Seq. ID no. 13617247
  misc_feature (1)..(2167): Ortholog of  Ceres SEQ ID NO 12613725 as cited in SEQ ID NO 68196
  misc_feature (1)..(2167): Ortholog of  Ceres SEQ ID NO 14301486 as cited in SEQ ID NO 69222

SEQ ID NO: 116683 - protein, 620 aa, Arabidopsis thaliana; identical to SEQ ID NO: 35261
  peptide (1)..(620): Ceres Seq. ID no. 13617248

SEQ ID NO: 116684 - protein, 541 aa, Arabidopsis thaliana; identical to SEQ ID NO: 35262
  peptide (1)..(541): Ceres Seq. ID no. 13617249

SEQ ID NO: 116685 - protein, 402 aa, Arabidopsis thaliana; identical to SEQ ID NO: 35263
  peptide (1)..(402): Ceres Seq. ID no. 13617250

SEQ ID NO: 116686 - DNA, 1217 bp, Arabidopsis thaliana; identical to SEQ ID NO: 105447
  misc_feature (1)..(1217): Ceres Seq. ID no. 13617263
  misc_feature (1)..(1217): Ortholog of  Ceres SEQ ID NO 13595414 as cited in SEQ ID NO 56539

SEQ ID NO: 116687 - protein, 280 aa, Arabidopsis thaliana; identical to SEQ ID NO: 24626
  peptide (1)..(280): Ceres Seq. ID no. 13617264

SEQ ID NO: 116688 - protein, 271 aa, Arabidopsis thaliana; identical to SEQ ID NO: 24627
  peptide (1)..(271): Ceres Seq. ID no. 13617265

SEQ ID NO: 116689 - protein, 258 aa, Arabidopsis thaliana; identical to SEQ ID NO: 21610
  peptide (1)..(258): Ceres Seq. ID no. 13617266

SEQ ID NO: 116690 - DNA, 3673 bp, Arabidopsis thaliana; identical to SEQ ID NO: 105451
  misc_feature (1)..(3673): Ceres Seq. ID no. 13617282
  misc_feature (1)..(3673): Ortholog of  Ceres SEQ ID NO 12586556 as cited in SEQ ID NO 64667
  misc_feature (1)..(3673): Ortholog of  Ceres SEQ ID NO 13660894 as cited in SEQ ID NO 67475

SEQ ID NO: 116691 - protein, 896 aa, Arabidopsis thaliana; identical to SEQ ID NO: 105452
  peptide (1)..(896): Ceres Seq. ID no. 13617283

SEQ ID NO: 116692 - protein, 726 aa, Arabidopsis thaliana; identical to SEQ ID NO: 105453
  peptide (1)..(726): Ceres Seq. ID no. 13617284

SEQ ID NO: 116693 - protein, 674 aa, Arabidopsis thaliana; identical to SEQ ID NO: 105454
  peptide (1)..(674): Ceres Seq. ID no. 13617285

SEQ ID NO: 116694 - DNA, 1091 bp, Arabidopsis thaliana; identical to SEQ ID NO: 105455
  misc_feature (1)..(1091): Ceres Seq. ID no. 13617301
  misc_feature (1)..(1091): Ortholog of  Ceres SEQ ID NO 14309202 as cited in SEQ ID NO 0

SEQ ID NO: 116695 - protein, 304 aa, Arabidopsis thaliana; identical to SEQ ID NO: 105456
  peptide (1)..(304): Ceres Seq. ID no. 13617302

SEQ ID NO: 116696 - protein, 260 aa, Arabidopsis thaliana; identical to SEQ ID NO: 105457
  peptide (1)..(260): Ceres Seq. ID no. 13617303

SEQ ID NO: 116697 - DNA, 854 bp, Arabidopsis thaliana; identical to SEQ ID NO: 105458
  misc_feature (1)..(854): Ceres Seq. ID no. 13617308
  misc_feature (1)..(854): Ortholog of  Ceres SEQ ID NO 13595667 as cited in SEQ ID NO 56786

SEQ ID NO: 116698 - protein, 242 aa, Arabidopsis thaliana; identical to SEQ ID NO: 105459
  peptide (1)..(242): Ceres Seq. ID no. 13617309

SEQ ID NO: 116699 - protein, 222 aa, Arabidopsis thaliana; identical to SEQ ID NO: 26736
  peptide (1)..(222): Ceres Seq. ID no. 13617310

SEQ ID NO: 116700 - protein, 210 aa, Arabidopsis thaliana; identical to SEQ ID NO: 26737
  peptide (1)..(210): Ceres Seq. ID no. 13617311

SEQ ID NO: 116701 - DNA, 1671 bp, Arabidopsis thaliana; identical to SEQ ID NO: 105462
  misc_feature (1)..(1671): Ceres Seq. ID no. 13617316
  misc_feature (1)..(1671): Ortholog of  Ceres SEQ ID NO 14311183 as cited in SEQ ID NO 58495
  misc_feature (1)..(1671): Ortholog of  Ceres SEQ ID NO 13502874 as cited in SEQ ID NO 66298
  misc_feature (1)..(1671): Ortholog of  Ceres SEQ ID NO 12614124 as cited in SEQ ID NO 68392

SEQ ID NO: 116702 - protein, 530 aa, Arabidopsis thaliana; identical to SEQ ID NO: 105463
  peptide (1)..(530): Ceres Seq. ID no. 13617317

SEQ ID NO: 116703 - protein, 512 aa, Arabidopsis thaliana; identical to SEQ ID NO: 105464
  peptide (1)..(512): Ceres Seq. ID no. 13617318

SEQ ID NO: 116704 - protein, 430 aa, Arabidopsis thaliana; identical to SEQ ID NO: 105465
  peptide (1)..(430): Ceres Seq. ID no. 13617319

SEQ ID NO: 116705 - DNA, 1154 bp, Arabidopsis thaliana; identical to SEQ ID NO: 105466
  misc_feature (1)..(1154): Ceres Seq. ID no. 13617320
  misc_feature (1)..(1154): Ortholog of  Ceres SEQ ID NO 13590967 as cited in SEQ ID NO 65553
  misc_feature (1)..(1154): Ortholog of  Ceres SEQ ID NO 14309438 as cited in SEQ ID NO 0

SEQ ID NO: 116706 - protein, 301 aa, Arabidopsis thaliana; identical to SEQ ID NO: 22798
  peptide (1)..(301): Ceres Seq. ID no. 13617321

SEQ ID NO: 116707 - protein, 246 aa, Arabidopsis thaliana; identical to SEQ ID NO: 22799
  peptide (1)..(246): Ceres Seq. ID no. 13617322

SEQ ID NO: 116708 - protein, 208 aa, Arabidopsis thaliana; identical to SEQ ID NO: 22800
  peptide (1)..(208): Ceres Seq. ID no. 13617323

SEQ ID NO: 116709 - DNA, 676 bp, Arabidopsis thaliana; identical to SEQ ID NO: 105470
  misc_feature (1)..(676): Ceres Seq. ID no. 13617328
  misc_feature (1)..(676): Ortholog of  Ceres SEQ ID NO 13583412 as cited in SEQ ID NO 62624

SEQ ID NO: 116710 - protein, 193 aa, Arabidopsis thaliana; identical to SEQ ID NO: 105471
  peptide (1)..(193): Ceres Seq. ID no. 13617329

SEQ ID NO: 116711 - protein, 181 aa, Arabidopsis thaliana; identical to SEQ ID NO: 27247
  peptide (1)..(181): Ceres Seq. ID no. 13617330

SEQ ID NO: 116712 - protein, 109 aa, Arabidopsis thaliana; identical to SEQ ID NO: 27248
  peptide (1)..(109): Ceres Seq. ID no. 13617331

SEQ ID NO: 116713 - DNA, 1150 bp, Arabidopsis thaliana; identical to SEQ ID NO: 105474
  misc_feature (1)..(1150): Ceres Seq. ID no. 13617332
  misc_feature (1)..(1150): Ortholog of  Ceres SEQ ID NO 14304842 as cited in SEQ ID NO 54198
  misc_feature (1)..(1150): Ortholog of  Ceres SEQ ID NO 14308683 as cited in SEQ ID NO 58723

SEQ ID NO: 116714 - protein, 285 aa, Arabidopsis thaliana; identical to SEQ ID NO: 105475
  peptide (1)..(285): Ceres Seq. ID no. 13617333

SEQ ID NO: 116715 - protein, 276 aa, Arabidopsis thaliana; identical to SEQ ID NO: 24352
  peptide (1)..(276): Ceres Seq. ID no. 13617334

SEQ ID NO: 116716 - DNA, 1654 bp, Arabidopsis thaliana; identical to SEQ ID NO: 105477
  misc_feature (1)..(1654): Ceres Seq. ID no. 13617335
  misc_feature (1)..(1654): Ortholog of  Ceres SEQ ID NO 12581920 as cited in SEQ ID NO 54896

SEQ ID NO: 116717 - protein, 451 aa, Arabidopsis thaliana; identical to SEQ ID NO: 105478
  peptide (1)..(451): Ceres Seq. ID no. 13617336

SEQ ID NO: 116718 - protein, 333 aa, Arabidopsis thaliana; identical to SEQ ID NO: 105479
  peptide (1)..(333): Ceres Seq. ID no. 13617337

SEQ ID NO: 116719 - DNA, 4715 bp, Arabidopsis thaliana; identical to SEQ ID NO: 105480
  misc_feature (1)..(4715): Ceres Seq. ID no. 13617338
  misc_feature (1)..(4715): Ortholog of  Ceres SEQ ID NO 15174740 as cited in SEQ ID NO 52905

SEQ ID NO: 116720 - protein, 1337 aa, Arabidopsis thaliana; identical to SEQ ID NO: 36916
  peptide (1)..(1337): Ceres Seq. ID no. 13617339

SEQ ID NO: 116721 - protein, 1237 aa, Arabidopsis thaliana; identical to SEQ ID NO: 36917
  peptide (1)..(1237): Ceres Seq. ID no. 13617340

SEQ ID NO: 116722 - protein, 1234 aa, Arabidopsis thaliana; identical to SEQ ID NO: 36918
  peptide (1)..(1234): Ceres Seq. ID no. 13617341

SEQ ID NO: 116723 - DNA, 761 bp, Arabidopsis thaliana; identical to SEQ ID NO: 105484
  misc_feature (1)..(761): Ceres Seq. ID no. 13617346
  misc_feature (1)..(761): Ortholog of  Ceres SEQ ID NO 13596727 as cited in SEQ ID NO 63000

SEQ ID NO: 116724 - protein, 178 aa, Arabidopsis thaliana; identical to SEQ ID NO: 31095
  peptide (1)..(178): Ceres Seq. ID no. 13617347

SEQ ID NO: 116725 - protein, 158 aa, Arabidopsis thaliana; identical to SEQ ID NO: 31096
  peptide (1)..(158): Ceres Seq. ID no. 13617348

SEQ ID NO: 116726 - protein, 115 aa, Arabidopsis thaliana; identical to SEQ ID NO: 31097
  peptide (1)..(115): Ceres Seq. ID no. 13617349

SEQ ID NO: 116727 - DNA, 1171 bp, Arabidopsis thaliana; identical to SEQ ID NO: 105488
  misc_feature (1)..(1171): Ceres Seq. ID no. 13617350
  misc_feature (1)..(1171): Ortholog of  Ceres SEQ ID NO 12562983 as cited in SEQ ID NO 53309
  misc_feature (1)..(1171): Ortholog of  Ceres SEQ ID NO 14309224 as cited in SEQ ID NO 0

SEQ ID NO: 116728 - protein, 338 aa, Arabidopsis thaliana; identical to SEQ ID NO: 105489
  peptide (1)..(338): Ceres Seq. ID no. 13617351

SEQ ID NO: 116729 - protein, 328 aa, Arabidopsis thaliana; identical to SEQ ID NO: 105490
  peptide (1)..(328): Ceres Seq. ID no. 13617352

SEQ ID NO: 116730 - protein, 266 aa, Arabidopsis thaliana; identical to SEQ ID NO: 105491
  peptide (1)..(266): Ceres Seq. ID no. 13617353

SEQ ID NO: 116731 - DNA, 1472 bp, Arabidopsis thaliana; identical to SEQ ID NO: 105492
  misc_feature (1)..(1472): Ceres Seq. ID no. 13617358
  misc_feature (1)..(1472): Ortholog of  Ceres SEQ ID NO 14315481 as cited in SEQ ID NO 56990

SEQ ID NO: 116732 - protein, 353 aa, Arabidopsis thaliana; identical to SEQ ID NO: 105493
  peptide (1)..(353): Ceres Seq. ID no. 13617359

SEQ ID NO: 116733 - protein, 253 aa, Arabidopsis thaliana; identical to SEQ ID NO: 105494
  peptide (1)..(253): Ceres Seq. ID no. 13617360

SEQ ID NO: 116734 - protein, 241 aa, Arabidopsis thaliana; identical to SEQ ID NO: 105495
  peptide (1)..(241): Ceres Seq. ID no. 13617361

SEQ ID NO: 116735 - DNA, 1275 bp, Arabidopsis thaliana; identical to SEQ ID NO: 105496
  misc_feature (1)..(1275): Ceres Seq. ID no. 13617362
  misc_feature (1)..(1275): Ortholog of  Ceres SEQ ID NO 13654273 as cited in SEQ ID NO 68551

SEQ ID NO: 116736 - protein, 360 aa, Arabidopsis thaliana; identical to SEQ ID NO: 105497
  peptide (1)..(360): Ceres Seq. ID no. 13617363

SEQ ID NO: 116737 - protein, 243 aa, Arabidopsis thaliana; identical to SEQ ID NO: 105498
  peptide (1)..(243): Ceres Seq. ID no. 13617364

SEQ ID NO: 116738 - protein, 242 aa, Arabidopsis thaliana; identical to SEQ ID NO: 105499
  peptide (1)..(242): Ceres Seq. ID no. 13617365

SEQ ID NO: 116739 - DNA, 731 bp, Arabidopsis thaliana; identical to SEQ ID NO: 105500
  misc_feature (1)..(731): Ceres Seq. ID no. 13617366
  misc_feature (1)..(731): Ortholog of  Ceres SEQ ID NO 15174048 as cited in SEQ ID NO 61892

SEQ ID NO: 116740 - protein, 171 aa, Arabidopsis thaliana; identical to SEQ ID NO: 105501
  peptide (1)..(171): Ceres Seq. ID no. 13617367

SEQ ID NO: 116741 - protein, 134 aa, Arabidopsis thaliana; identical to SEQ ID NO: 105502
  peptide (1)..(134): Ceres Seq. ID no. 13617368

SEQ ID NO: 116742 - protein, 86 aa, Arabidopsis thaliana; identical to SEQ ID NO: 29125
  peptide (1)..(86): Ceres Seq. ID no. 13617369

SEQ ID NO: 116743 - DNA, 836 bp, Arabidopsis thaliana; identical to SEQ ID NO: 105504
  misc_feature (1)..(836): Ceres Seq. ID no. 13617378
  misc_feature (1)..(836): Ortholog of  Ceres SEQ ID NO 12624653 as cited in SEQ ID NO 61262
  misc_feature (1)..(836): Ortholog of  Ceres SEQ ID NO 12579223 as cited in SEQ ID NO 0
  misc_feature (1)..(836): Ortholog of  Ceres SEQ ID NO 12635708 as cited in SEQ ID NO 0

SEQ ID NO: 116744 - protein, 158 aa, Arabidopsis thaliana; identical to SEQ ID NO: 26093
  peptide (1)..(158): Ceres Seq. ID no. 13617379

SEQ ID NO: 116745 - protein, 97 aa, Arabidopsis thaliana; identical to SEQ ID NO: 26094
  peptide (1)..(97): Ceres Seq. ID no. 13617380

SEQ ID NO: 116746 - DNA, 1106 bp, Arabidopsis thaliana; identical to SEQ ID NO: 105507
  misc_feature (1)..(1106): Ceres Seq. ID no. 13617381
  misc_feature (1)..(1106): Ortholog of  Ceres SEQ ID NO 13594363 as cited in SEQ ID NO 60250
  misc_feature (1)..(1106): Ortholog of  Ceres SEQ ID NO 15225478 as cited in SEQ ID NO 63805
  misc_feature (1)..(1106): Ortholog of  Ceres SEQ ID NO 13596420 as cited in SEQ ID NO 68738
  misc_feature (1)..(1106): Ortholog of  Ceres SEQ ID NO 14309260 as cited in SEQ ID NO 0

SEQ ID NO: 116747 - protein, 264 aa, Arabidopsis thaliana; identical to SEQ ID NO: 21152
  peptide (1)..(264): Ceres Seq. ID no. 13617382

SEQ ID NO: 116748 - protein, 240 aa, Arabidopsis thaliana; identical to SEQ ID NO: 21153
  peptide (1)..(240): Ceres Seq. ID no. 13617383

SEQ ID NO: 116749 - protein, 159 aa, Arabidopsis thaliana; identical to SEQ ID NO: 21154
  peptide (1)..(159): Ceres Seq. ID no. 13617384

SEQ ID NO: 116750 - DNA, 1766 bp, Arabidopsis thaliana; identical to SEQ ID NO: 105511
  misc_feature (1)..(1766): Ceres Seq. ID no. 13617387
  misc_feature (1)..(1766): Ortholog of  Ceres SEQ ID NO 13597446 as cited in SEQ ID NO 64098
  misc_feature (1)..(1766): Ortholog of  Ceres SEQ ID NO 15226246 as cited in SEQ ID NO 68314

SEQ ID NO: 116751 - protein, 433 aa, Arabidopsis thaliana; identical to SEQ ID NO: 105512
  peptide (1)..(433): Ceres Seq. ID no. 13617388

SEQ ID NO: 116752 - protein, 398 aa, Arabidopsis thaliana; identical to SEQ ID NO: 105513
  peptide (1)..(398): Ceres Seq. ID no. 13617389

SEQ ID NO: 116753 - protein, 273 aa, Arabidopsis thaliana; identical to SEQ ID NO: 105514
  peptide (1)..(273): Ceres Seq. ID no. 13617390

SEQ ID NO: 116754 - DNA, 802 bp, Arabidopsis thaliana; identical to SEQ ID NO: 105515
  misc_feature (1)..(802): Ceres Seq. ID no. 13617391
  misc_feature (1)..(802): Ortholog of  Ceres SEQ ID NO 13638897 as cited in SEQ ID NO 55839
  misc_feature (1)..(802): Ortholog of  Ceres SEQ ID NO 15177758 as cited in SEQ ID NO 57504
  misc_feature (1)..(802): Ortholog of  Ceres SEQ ID NO 13624040 as cited in SEQ ID NO 0

SEQ ID NO: 116755 - protein, 168 aa, Arabidopsis thaliana; identical to SEQ ID NO: 22588
  peptide (1)..(168): Ceres Seq. ID no. 13617392

SEQ ID NO: 116756 - protein, 88 aa, Arabidopsis thaliana; identical to SEQ ID NO: 22589
  peptide (1)..(88): Ceres Seq. ID no. 13617393

SEQ ID NO: 116757 - DNA, 944 bp, Arabidopsis thaliana; identical to SEQ ID NO: 105518
  misc_feature (1)..(944): Ceres Seq. ID no. 13617402
  misc_feature (1)..(944): Ortholog of  Ceres SEQ ID NO 15225572 as cited in SEQ ID NO 61651

SEQ ID NO: 116758 - protein, 257 aa, Arabidopsis thaliana; identical to SEQ ID NO: 105519
  peptide (1)..(257): Ceres Seq. ID no. 13617403

SEQ ID NO: 116759 - protein, 238 aa, Arabidopsis thaliana; identical to SEQ ID NO: 23294
  peptide (1)..(238): Ceres Seq. ID no. 13617404

SEQ ID NO: 116760 - protein, 162 aa, Arabidopsis thaliana; identical to SEQ ID NO: 23295
  peptide (1)..(162): Ceres Seq. ID no. 13617405

SEQ ID NO: 116761 - DNA, 1444 bp, Arabidopsis thaliana; identical to SEQ ID NO: 105522
  misc_feature (1)..(1444): Ceres Seq. ID no. 13617406
  misc_feature (1)..(1444): Ortholog of  Ceres SEQ ID NO 13577044 as cited in SEQ ID NO 58682

SEQ ID NO: 116762 - protein, 358 aa, Arabidopsis thaliana; identical to SEQ ID NO: 25341
  peptide (1)..(358): Ceres Seq. ID no. 13617407

SEQ ID NO: 116763 - protein, 278 aa, Arabidopsis thaliana; identical to SEQ ID NO: 25342
  peptide (1)..(278): Ceres Seq. ID no. 13617408

SEQ ID NO: 116764 - protein, 250 aa, Arabidopsis thaliana; identical to SEQ ID NO: 25343
  peptide (1)..(250): Ceres Seq. ID no. 13617409

SEQ ID NO: 116765 - DNA, 1189 bp, Arabidopsis thaliana; identical to SEQ ID NO: 105526
  misc_feature (1)..(1189): Ceres Seq. ID no. 13617410
  misc_feature (1)..(1189): Ortholog of  Ceres SEQ ID NO 14301430 as cited in SEQ ID NO 56553
  misc_feature (1)..(1189): Ortholog of  Ceres SEQ ID NO 13639124 as cited in SEQ ID NO 56718
  misc_feature (1)..(1189): Ortholog of  Ceres SEQ ID NO 15175700 as cited in SEQ ID NO 58584
  misc_feature (1)..(1189): Ortholog of  Ceres SEQ ID NO 13596474 as cited in SEQ ID NO 62169
  misc_feature (1)..(1189): Ortholog of  Ceres SEQ ID NO 13598714 as cited in SEQ ID NO 62656
  misc_feature (1)..(1189): Ortholog of  Ceres SEQ ID NO 13596969 as cited in SEQ ID NO 63375
  misc_feature (1)..(1189): Ortholog of  Ceres SEQ ID NO 13597519 as cited in SEQ ID NO 64759
  misc_feature (1)..(1189): Ortholog of  Ceres SEQ ID NO 13597870 as cited in SEQ ID NO 64982
  misc_feature (1)..(1189): Ortholog of  Ceres SEQ ID NO 13656123 as cited in SEQ ID NO 65212
  misc_feature (1)..(1189): Ortholog of  Ceres SEQ ID NO 13595926 as cited in SEQ ID NO 67778
  misc_feature (1)..(1189): Ortholog of  Ceres SEQ ID NO 13662323 as cited in SEQ ID NO 68305

SEQ ID NO: 116766 - protein, 326 aa, Arabidopsis thaliana; identical to SEQ ID NO: 105527
  peptide (1)..(326): Ceres Seq. ID no. 13617411

SEQ ID NO: 116767 - protein, 317 aa, Arabidopsis thaliana; identical to SEQ ID NO: 105528
  peptide (1)..(317): Ceres Seq. ID no. 13617412

SEQ ID NO: 116768 - protein, 300 aa, Arabidopsis thaliana; identical to SEQ ID NO: 105529
  peptide (1)..(300): Ceres Seq. ID no. 13617413

SEQ ID NO: 116769 - DNA, 1354 bp, Arabidopsis thaliana; identical to SEQ ID NO: 105530
  misc_feature (1)..(1354): Ceres Seq. ID no. 13617414
  misc_feature (1)..(1354): Ortholog of  Ceres SEQ ID NO 15178096 as cited in SEQ ID NO 52497

SEQ ID NO: 116770 - protein, 398 aa, Arabidopsis thaliana; identical to SEQ ID NO: 105531
  peptide (1)..(398): Ceres Seq. ID no. 13617415

SEQ ID NO: 116771 - protein, 371 aa, Arabidopsis thaliana; identical to SEQ ID NO: 105532
  peptide (1)..(371): Ceres Seq. ID no. 13617416

SEQ ID NO: 116772 - protein, 348 aa, Arabidopsis thaliana; identical to SEQ ID NO: 105533
  peptide (1)..(348): Ceres Seq. ID no. 13617417

SEQ ID NO: 116773 - DNA, 1393 bp, Arabidopsis thaliana; identical to SEQ ID NO: 105534
  misc_feature (1)..(1393): Ceres Seq. ID no. 13617418
  misc_feature (1)..(1393): Ortholog of  Ceres SEQ ID NO 13502952 as cited in SEQ ID NO 62271
  misc_feature (1)..(1393): Ortholog of  Ceres SEQ ID NO 13502973 as cited in SEQ ID NO 68052
  misc_feature (1)..(1393): Ortholog of  Ceres SEQ ID NO 13596000 as cited in SEQ ID NO 68188

SEQ ID NO: 116774 - protein, 371 aa, Arabidopsis thaliana; identical to SEQ ID NO: 24326
  peptide (1)..(371): Ceres Seq. ID no. 13617419

SEQ ID NO: 116775 - protein, 364 aa, Arabidopsis thaliana; identical to SEQ ID NO: 24327
  peptide (1)..(364): Ceres Seq. ID no. 13617420

SEQ ID NO: 116776 - protein, 348 aa, Arabidopsis thaliana; identical to SEQ ID NO: 24328
  peptide (1)..(348): Ceres Seq. ID no. 13617421

SEQ ID NO: 116777 - DNA, 738 bp, Arabidopsis thaliana; identical to SEQ ID NO: 105538
  misc_feature (1)..(738): Ceres Seq. ID no. 13617422
  misc_feature (1)..(738): Ortholog of  Ceres SEQ ID NO 15174034 as cited in SEQ ID NO 0

SEQ ID NO: 116778 - protein, 173 aa, Arabidopsis thaliana; identical to SEQ ID NO: 105539
  peptide (1)..(173): Ceres Seq. ID no. 13617423

SEQ ID NO: 116779 - protein, 157 aa, Arabidopsis thaliana; identical to SEQ ID NO: 23791
  peptide (1)..(157): Ceres Seq. ID no. 13617424

SEQ ID NO: 116780 - protein, 129 aa, Arabidopsis thaliana; identical to SEQ ID NO: 23792
  peptide (1)..(129): Ceres Seq. ID no. 13617425

SEQ ID NO: 116781 - DNA, 710 bp, Arabidopsis thaliana; identical to SEQ ID NO: 105542
  misc_feature (1)..(710): Ceres Seq. ID no. 13617426
  misc_feature (1)..(710): Ortholog of  Ceres SEQ ID NO 15174034 as cited in SEQ ID NO 0

SEQ ID NO: 116782 - protein, 159 aa, Arabidopsis thaliana; identical to SEQ ID NO: 105543
  peptide (1)..(159): Ceres Seq. ID no. 13617427

SEQ ID NO: 116783 - DNA, 904 bp, Arabidopsis thaliana; identical to SEQ ID NO: 105544
  misc_feature (1)..(904): Ceres Seq. ID no. 13617428
  misc_feature (1)..(904): Ortholog of  Ceres SEQ ID NO 13595658 as cited in SEQ ID NO 59888
  misc_feature (1)..(904): Ortholog of  Ceres SEQ ID NO 13662324 as cited in SEQ ID NO 62162

SEQ ID NO: 116784 - protein, 244 aa, Arabidopsis thaliana; identical to SEQ ID NO: 105545
  peptide (1)..(244): Ceres Seq. ID no. 13617429

SEQ ID NO: 116785 - protein, 182 aa, Arabidopsis thaliana; identical to SEQ ID NO: 105546
  peptide (1)..(182): Ceres Seq. ID no. 13617430

SEQ ID NO: 116786 - DNA, 825 bp, Arabidopsis thaliana; identical to SEQ ID NO: 105547
  misc_feature (1)..(825): Ceres Seq. ID no. 13617435
  misc_feature (1)..(825): Ortholog of  Ceres SEQ ID NO 12609177 as cited in SEQ ID NO 55753
  misc_feature (1)..(825): Ortholog of  Ceres SEQ ID NO 12609935 as cited in SEQ ID NO 55757
  misc_feature (1)..(825): Ortholog of  Ceres SEQ ID NO 13594206 as cited in SEQ ID NO 59075
  misc_feature (1)..(825): Ortholog of  Ceres SEQ ID NO 13654038 as cited in SEQ ID NO 69261
  misc_feature (1)..(825): Ortholog of  Ceres SEQ ID NO 14309346 as cited in SEQ ID NO 0

SEQ ID NO: 116787 - protein, 171 aa, Arabidopsis thaliana; identical to SEQ ID NO: 105548
  peptide (1)..(171): Ceres Seq. ID no. 13617436

SEQ ID NO: 116788 - protein, 101 aa, Arabidopsis thaliana; identical to SEQ ID NO: 21415
  peptide (1)..(101): Ceres Seq. ID no. 13617437

SEQ ID NO: 116789 - DNA, 1295 bp, Arabidopsis thaliana; identical to SEQ ID NO: 105550
  misc_feature (1)..(1295): Ceres Seq. ID no. 13617471
  misc_feature (1)..(1295): Ortholog of  Ceres SEQ ID NO 13662567 as cited in SEQ ID NO 62884

SEQ ID NO: 116790 - protein, 349 aa, Arabidopsis thaliana; identical to SEQ ID NO: 24088
  peptide (1)..(349): Ceres Seq. ID no. 13617472

SEQ ID NO: 116791 - protein, 252 aa, Arabidopsis thaliana; identical to SEQ ID NO: 24089
  peptide (1)..(252): Ceres Seq. ID no. 13617473

SEQ ID NO: 116792 - protein, 238 aa, Arabidopsis thaliana; identical to SEQ ID NO: 24090
  peptide (1)..(238): Ceres Seq. ID no. 13617474

SEQ ID NO: 116793 - DNA, 1271 bp, Arabidopsis thaliana; identical to SEQ ID NO: 105554
  misc_feature (1)..(1271): Ceres Seq. ID no. 13617475
  misc_feature (1)..(1271): Ortholog of  Ceres SEQ ID NO 14311596 as cited in SEQ ID NO 51728
  misc_feature (1)..(1271): Ortholog of  Ceres SEQ ID NO 12617197 as cited in SEQ ID NO 63406
  misc_feature (1)..(1271): Ortholog of  Ceres SEQ ID NO 13597804 as cited in SEQ ID NO 64182
  misc_feature (1)..(1271): Ortholog of  Ceres SEQ ID NO 14302768 as cited in SEQ ID NO 64889
  misc_feature (1)..(1271): Ortholog of  Ceres SEQ ID NO 13598565 as cited in SEQ ID NO 65250
  misc_feature (1)..(1271): Ortholog of  Ceres SEQ ID NO 13598597 as cited in SEQ ID NO 65496
  misc_feature (1)..(1271): Ortholog of  Ceres SEQ ID NO 13596284 as cited in SEQ ID NO 68273
  misc_feature (1)..(1271): Ortholog of  Ceres SEQ ID NO 14308995 as cited in SEQ ID NO 0
  misc_feature (1)..(1271): Ortholog of  Ceres SEQ ID NO 15179068 as cited in SEQ ID NO 0

SEQ ID NO: 116794 - protein, 332 aa, Arabidopsis thaliana; identical to SEQ ID NO: 105555
  peptide (1)..(332): Ceres Seq. ID no. 13617476

SEQ ID NO: 116795 - protein, 246 aa, Arabidopsis thaliana; identical to SEQ ID NO: 105556
  peptide (1)..(246): Ceres Seq. ID no. 13617477

SEQ ID NO: 116796 - protein, 239 aa, Arabidopsis thaliana; identical to SEQ ID NO: 105557
  peptide (1)..(239): Ceres Seq. ID no. 13617478

SEQ ID NO: 116797 - DNA, 1189 bp, Arabidopsis thaliana; identical to SEQ ID NO: 105558
  misc_feature (1)..(1189): Ceres Seq. ID no. 13617483
  misc_feature (1)..(1189): Ortholog of  Ceres SEQ ID NO 14306479 as cited in SEQ ID NO 53033

SEQ ID NO: 116798 - protein, 302 aa, Arabidopsis thaliana; identical to SEQ ID NO: 27413
  peptide (1)..(302): Ceres Seq. ID no. 13617484

SEQ ID NO: 116799 - protein, 281 aa, Arabidopsis thaliana; identical to SEQ ID NO: 27414
  peptide (1)..(281): Ceres Seq. ID no. 13617485

SEQ ID NO: 116800 - protein, 253 aa, Arabidopsis thaliana; identical to SEQ ID NO: 27415
  peptide (1)..(253): Ceres Seq. ID no. 13617486

SEQ ID NO: 116801 - DNA, 681 bp, Arabidopsis thaliana; identical to SEQ ID NO: 105562
  misc_feature (1)..(681): Ceres Seq. ID no. 13617487
  misc_feature (1)..(681): Ortholog of  Ceres SEQ ID NO 12612236 as cited in SEQ ID NO 58141

SEQ ID NO: 116802 - protein, 170 aa, Arabidopsis thaliana; identical to SEQ ID NO: 105563
  peptide (1)..(170): Ceres Seq. ID no. 13617488

SEQ ID NO: 116803 - protein, 164 aa, Arabidopsis thaliana; identical to SEQ ID NO: 105564
  peptide (1)..(164): Ceres Seq. ID no. 13617489

SEQ ID NO: 116804 - protein, 125 aa, Arabidopsis thaliana; identical to SEQ ID NO: 105565
  peptide (1)..(125): Ceres Seq. ID no. 13617490

SEQ ID NO: 116805 - DNA, 1614 bp, Arabidopsis thaliana; identical to SEQ ID NO: 105566
  misc_feature (1)..(1614): Ceres Seq. ID no. 13617491
  misc_feature (1)..(1614): Ortholog of  Ceres SEQ ID NO 15178767 as cited in SEQ ID NO 55317
  misc_feature (1)..(1614): Ortholog of  Ceres SEQ ID NO 13657647 as cited in SEQ ID NO 66399

SEQ ID NO: 116806 - protein, 443 aa, Arabidopsis thaliana; identical to SEQ ID NO: 105567
  peptide (1)..(443): Ceres Seq. ID no. 13617492

SEQ ID NO: 116807 - protein, 372 aa, Arabidopsis thaliana; identical to SEQ ID NO: 105568
  peptide (1)..(372): Ceres Seq. ID no. 13617493

SEQ ID NO: 116808 - protein, 371 aa, Arabidopsis thaliana; identical to SEQ ID NO: 105569
  peptide (1)..(371): Ceres Seq. ID no. 13617494

SEQ ID NO: 116809 - DNA, 1467 bp, Arabidopsis thaliana; identical to SEQ ID NO: 105570
  misc_feature (1)..(1467): Ceres Seq. ID no. 13617495
  misc_feature (1)..(1467): Ortholog of  Ceres SEQ ID NO 15226493 as cited in SEQ ID NO 59078

SEQ ID NO: 116810 - protein, 488 aa, Arabidopsis thaliana; identical to SEQ ID NO: 105571
  peptide (1)..(488): Ceres Seq. ID no. 13617496

SEQ ID NO: 116811 - protein, 486 aa, Arabidopsis thaliana; identical to SEQ ID NO: 105572
  peptide (1)..(486): Ceres Seq. ID no. 13617497

SEQ ID NO: 116812 - protein, 483 aa, Arabidopsis thaliana; identical to SEQ ID NO: 105573
  peptide (1)..(483): Ceres Seq. ID no. 13617498

SEQ ID NO: 116813 - DNA, 1457 bp, Arabidopsis thaliana; identical to SEQ ID NO: 105574
  misc_feature (1)..(1457): Ceres Seq. ID no. 13617519
  misc_feature (1)..(1457): Ortholog of  Ceres SEQ ID NO 15168545 as cited in SEQ ID NO 57829
  misc_feature (1)..(1457): Ortholog of  Ceres SEQ ID NO 15168468 as cited in SEQ ID NO 58115
  misc_feature (1)..(1457): Ortholog of  Ceres SEQ ID NO 13596440 as cited in SEQ ID NO 68769

SEQ ID NO: 116814 - protein, 327 aa, Arabidopsis thaliana; identical to SEQ ID NO: 30793
  peptide (1)..(327): Ceres Seq. ID no. 13617520

SEQ ID NO: 116815 - protein, 302 aa, Arabidopsis thaliana; identical to SEQ ID NO: 30794
  peptide (1)..(302): Ceres Seq. ID no. 13617521

SEQ ID NO: 116816 - protein, 250 aa, Arabidopsis thaliana; identical to SEQ ID NO: 30795
  peptide (1)..(250): Ceres Seq. ID no. 13617522

SEQ ID NO: 116817 - DNA, 2535 bp, Arabidopsis thaliana; identical to SEQ ID NO: 105578
  misc_feature (1)..(2535): Ceres Seq. ID no. 13617523
  misc_feature (1)..(2535): Ortholog of  Ceres SEQ ID NO 15168464 as cited in SEQ ID NO 59187

SEQ ID NO: 116818 - protein, 730 aa, Arabidopsis thaliana; identical to SEQ ID NO: 30500
  peptide (1)..(730): Ceres Seq. ID no. 13617524

SEQ ID NO: 116819 - protein, 720 aa, Arabidopsis thaliana; identical to SEQ ID NO: 30501
  peptide (1)..(720): Ceres Seq. ID no. 13617525

SEQ ID NO: 116820 - protein, 643 aa, Arabidopsis thaliana; identical to SEQ ID NO: 30502
  peptide (1)..(643): Ceres Seq. ID no. 13617526

SEQ ID NO: 116821 - DNA, 1329 bp, Arabidopsis thaliana; identical to SEQ ID NO: 105582
  misc_feature (1)..(1329): Ceres Seq. ID no. 13617527
  misc_feature (1)..(1329): Ortholog of  Ceres SEQ ID NO 14310896 as cited in SEQ ID NO 53480
  misc_feature (1)..(1329): Ortholog of  Ceres SEQ ID NO 13660685 as cited in SEQ ID NO 67678

SEQ ID NO: 116822 - protein, 395 aa, Arabidopsis thaliana; identical to SEQ ID NO: 105583
  peptide (1)..(395): Ceres Seq. ID no. 13617528

SEQ ID NO: 116823 - protein, 387 aa, Arabidopsis thaliana; identical to SEQ ID NO: 105584
  peptide (1)..(387): Ceres Seq. ID no. 13617529

SEQ ID NO: 116824 - protein, 352 aa, Arabidopsis thaliana; identical to SEQ ID NO: 105585
  peptide (1)..(352): Ceres Seq. ID no. 13617530

SEQ ID NO: 116825 - DNA, 1592 bp, Arabidopsis thaliana; identical to SEQ ID NO: 105586
  misc_feature (1)..(1592): Ceres Seq. ID no. 13617531
  misc_feature (1)..(1592): Ortholog of  Ceres SEQ ID NO 15177903 as cited in SEQ ID NO 54993
  misc_feature (1)..(1592): Ortholog of  Ceres SEQ ID NO 15177994 as cited in SEQ ID NO 55641
  misc_feature (1)..(1592): Ortholog of  Ceres SEQ ID NO 13595454 as cited in SEQ ID NO 56502
  misc_feature (1)..(1592): Ortholog of  Ceres SEQ ID NO 13589016 as cited in SEQ ID NO 68472

SEQ ID NO: 116826 - protein, 369 aa, Arabidopsis thaliana; identical to SEQ ID NO: 105587
  peptide (1)..(369): Ceres Seq. ID no. 13617532

SEQ ID NO: 116827 - DNA, 905 bp, Arabidopsis thaliana; identical to SEQ ID NO: 105588
  misc_feature (1)..(905): Ceres Seq. ID no. 13617537
  misc_feature (1)..(905): Ortholog of  Ceres SEQ ID NO 13594390 as cited in SEQ ID NO 51060
  misc_feature (1)..(905): Ortholog of  Ceres SEQ ID NO 14309565 as cited in SEQ ID NO 52731

SEQ ID NO: 116828 - protein, 215 aa, Arabidopsis thaliana; identical to SEQ ID NO: 105589
  peptide (1)..(215): Ceres Seq. ID no. 13617538

SEQ ID NO: 116829 - protein, 202 aa, Arabidopsis thaliana; identical to SEQ ID NO: 105590
  peptide (1)..(202): Ceres Seq. ID no. 13617539

SEQ ID NO: 116830 - protein, 117 aa, Arabidopsis thaliana; identical to SEQ ID NO: 105591
  peptide (1)..(117): Ceres Seq. ID no. 13617540

SEQ ID NO: 116831 - DNA, 1131 bp, Arabidopsis thaliana; identical to SEQ ID NO: 105592
  misc_feature (1)..(1131): Ceres Seq. ID no. 13617549
  misc_feature (1)..(1131): Ortholog of  Ceres SEQ ID NO 12388947 as cited in SEQ ID NO 64451

SEQ ID NO: 116832 - protein, 304 aa, Arabidopsis thaliana; identical to SEQ ID NO: 105593
  peptide (1)..(304): Ceres Seq. ID no. 13617550

SEQ ID NO: 116833 - protein, 283 aa, Arabidopsis thaliana; identical to SEQ ID NO: 25615
  peptide (1)..(283): Ceres Seq. ID no. 13617551

SEQ ID NO: 116834 - protein, 245 aa, Arabidopsis thaliana; identical to SEQ ID NO: 25616
  peptide (1)..(245): Ceres Seq. ID no. 13617552

SEQ ID NO: 116835 - DNA, 915 bp, Arabidopsis thaliana; identical to SEQ ID NO: 105596
  misc_feature (1)..(915): Ceres Seq. ID no. 13617555
  misc_feature (1)..(915): Ortholog of  Ceres SEQ ID NO 13647991 as cited in SEQ ID NO 187

SEQ ID NO: 116836 - protein, 236 aa, Arabidopsis thaliana; identical to SEQ ID NO: 105597
  peptide (1)..(236): Ceres Seq. ID no. 13617556

SEQ ID NO: 116837 - protein, 222 aa, Arabidopsis thaliana; identical to SEQ ID NO: 105598
  peptide (1)..(222): Ceres Seq. ID no. 13617557

SEQ ID NO: 116838 - DNA, 1017 bp, Arabidopsis thaliana; identical to SEQ ID NO: 105599
  misc_feature (1)..(1017): Ceres Seq. ID no. 13617558
  misc_feature (1)..(1017): Ortholog of  Ceres SEQ ID NO 12609304 as cited in SEQ ID NO 51524
  misc_feature (1)..(1017): Ortholog of  Ceres SEQ ID NO 14308976 as cited in SEQ ID NO 0

SEQ ID NO: 116839 - protein, 292 aa, Arabidopsis thaliana; identical to SEQ ID NO: 39199
  peptide (1)..(292): Ceres Seq. ID no. 13617559

SEQ ID NO: 116840 - protein, 257 aa, Arabidopsis thaliana; identical to SEQ ID NO: 39200
  peptide (1)..(257): Ceres Seq. ID no. 13617560

SEQ ID NO: 116841 - protein, 200 aa, Arabidopsis thaliana; identical to SEQ ID NO: 39201
  peptide (1)..(200): Ceres Seq. ID no. 13617561

SEQ ID NO: 116842 - DNA, 1306 bp, Arabidopsis thaliana; identical to SEQ ID NO: 105603
  misc_feature (1)..(1306): Ceres Seq. ID no. 13617566
  misc_feature (1)..(1306): Ortholog of  Ceres SEQ ID NO 15169350 as cited in SEQ ID NO 53271

SEQ ID NO: 116843 - protein, 368 aa, Arabidopsis thaliana; identical to SEQ ID NO: 105604
  peptide (1)..(368): Ceres Seq. ID no. 13617567

SEQ ID NO: 116844 - protein, 359 aa, Arabidopsis thaliana; identical to SEQ ID NO: 105605
  peptide (1)..(359): Ceres Seq. ID no. 13617568

SEQ ID NO: 116845 - protein, 306 aa, Arabidopsis thaliana; identical to SEQ ID NO: 105606
  peptide (1)..(306): Ceres Seq. ID no. 13617569

SEQ ID NO: 116846 - DNA, 666 bp, Arabidopsis thaliana; identical to SEQ ID NO: 105607
  misc_feature (1)..(666): Ceres Seq. ID no. 13617581
  misc_feature (1)..(666): Ortholog of  Ceres SEQ ID NO 12585656 as cited in SEQ ID NO 68874

SEQ ID NO: 116847 - protein, 163 aa, Arabidopsis thaliana; identical to SEQ ID NO: 29911
  peptide (1)..(163): Ceres Seq. ID no. 13617582

SEQ ID NO: 116848 - protein, 146 aa, Arabidopsis thaliana [sequence omitted]

SEQ ID NO: 116849 - protein, 109 aa, Arabidopsis thaliana; identical to SEQ ID NO: 29913
  peptide (1)..(109): Ceres Seq. ID no. 13617584

SEQ ID NO: 116850 - DNA, 1560 bp, Arabidopsis thaliana; identical to SEQ ID NO: 105611
  misc_feature (1)..(1560): Ceres Seq. ID no. 13617585
  misc_feature (1)..(1560): Ortholog of  Ceres SEQ ID NO 14307534 as cited in SEQ ID NO 55715
  misc_feature (1)..(1560): Ortholog of  Ceres SEQ ID NO 14307548 as cited in SEQ ID NO 58859
  misc_feature (1)..(1560): Ortholog of  Ceres SEQ ID NO 15172032 as cited in SEQ ID NO 59531

SEQ ID NO: 116851 - protein, 466 aa, Arabidopsis thaliana; identical to SEQ ID NO: 105612
  peptide (1)..(466): Ceres Seq. ID no. 13617586

SEQ ID NO: 116852 - protein, 414 aa, Arabidopsis thaliana; identical to SEQ ID NO: 105613
  peptide (1)..(414): Ceres Seq. ID no. 13617587

SEQ ID NO: 116853 - protein, 412 aa, Arabidopsis thaliana; identical to SEQ ID NO: 105614
  peptide (1)..(412): Ceres Seq. ID no. 13617588

SEQ ID NO: 116854 - DNA, 815 bp, Arabidopsis thaliana; identical to SEQ ID NO: 105615
  misc_feature (1)..(815): Ceres Seq. ID no. 13617589
  misc_feature (1)..(815): Ortholog of  Ceres SEQ ID NO 15170072 as cited in SEQ ID NO 55533
  misc_feature (1)..(815): Ortholog of  Ceres SEQ ID NO 15173959 as cited in SEQ ID NO 63398
  misc_feature (1)..(815): Ortholog of  Ceres SEQ ID NO 13663564 as cited in SEQ ID NO 66903

SEQ ID NO: 116855 - protein, 159 aa, Arabidopsis thaliana; identical to SEQ ID NO: 27234
  peptide (1)..(159): Ceres Seq. ID no. 13617590

SEQ ID NO: 116856 - protein, 124 aa, Arabidopsis thaliana; identical to SEQ ID NO: 27235
  peptide (1)..(124): Ceres Seq. ID no. 13617591

SEQ ID NO: 116857 - protein, 116 aa, Arabidopsis thaliana; identical to SEQ ID NO: 27236
  peptide (1)..(116): Ceres Seq. ID no. 13617592

SEQ ID NO: 116858 - DNA, 986 bp, Arabidopsis thaliana; identical to SEQ ID NO: 105619
  misc_feature (1)..(986): Ceres Seq. ID no. 13617593
  misc_feature (1)..(986): Ortholog of  Ceres SEQ ID NO 13661969 as cited in SEQ ID NO 61215
  misc_feature (1)..(986): Ortholog of  Ceres SEQ ID NO 12614809 as cited in SEQ ID NO 68808
  misc_feature (1)..(986): Ortholog of  Ceres SEQ ID NO 12634366 as cited in SEQ ID NO 0
  misc_feature (1)..(986): Ortholog of  Ceres SEQ ID NO 14309113 as cited in SEQ ID NO 0
  misc_feature (1)..(986): Ortholog of  Ceres SEQ ID NO 15175257 as cited in SEQ ID NO 0

SEQ ID NO: 116859 - protein, 195 aa, Arabidopsis thaliana; identical to SEQ ID NO: 27036
  peptide (1)..(195): Ceres Seq. ID no. 13617594

SEQ ID NO: 116860 - DNA, 1190 bp, Arabidopsis thaliana; identical to SEQ ID NO: 105621
  misc_feature (1)..(1190): Ceres Seq. ID no. 13617595
  misc_feature (1)..(1190): Ortholog of  Ceres SEQ ID NO 15171634 as cited in SEQ ID NO 57593
  misc_feature (1)..(1190): Ortholog of  Ceres SEQ ID NO 14301936 as cited in SEQ ID NO 67361

SEQ ID NO: 116861 - protein, 299 aa, Arabidopsis thaliana; identical to SEQ ID NO: 25372
  peptide (1)..(299): Ceres Seq. ID no. 13617596

SEQ ID NO: 116862 - protein, 280 aa, Arabidopsis thaliana; identical to SEQ ID NO: 25373
  peptide (1)..(280): Ceres Seq. ID no. 13617597

SEQ ID NO: 116863 - protein, 177 aa, Arabidopsis thaliana; identical to SEQ ID NO: 25374
  peptide (1)..(177): Ceres Seq. ID no. 13617598

SEQ ID NO: 116864 - DNA, 797 bp, Arabidopsis thaliana; identical to SEQ ID NO: 105625
  misc_feature (1)..(797): Ceres Seq. ID no. 13617602
  misc_feature (1)..(797): Ortholog of  Ceres SEQ ID NO 13647991 as cited in SEQ ID NO 187

SEQ ID NO: 116865 - protein, 206 aa, Arabidopsis thaliana; identical to SEQ ID NO: 105626
  peptide (1)..(206): Ceres Seq. ID no. 13617603

SEQ ID NO: 116866 - protein, 200 aa, Arabidopsis thaliana; identical to SEQ ID NO: 105627
  peptide (1)..(200): Ceres Seq. ID no. 13617604

SEQ ID NO: 116867 - protein, 197 aa, Arabidopsis thaliana; identical to SEQ ID NO: 105628
  peptide (1)..(197): Ceres Seq. ID no. 13617605

SEQ ID NO: 116868 - DNA, 1957 bp, Arabidopsis thaliana; identical to SEQ ID NO: 105629
  misc_feature (1)..(1957): Ceres Seq. ID no. 13617606
  misc_feature (1)..(1957): Ortholog of  Ceres SEQ ID NO 14307728 as cited in SEQ ID NO 54710

SEQ ID NO: 116869 - protein, 599 aa, Arabidopsis thaliana; identical to SEQ ID NO: 105630
  peptide (1)..(599): Ceres Seq. ID no. 13617607

SEQ ID NO: 116870 - protein, 585 aa, Arabidopsis thaliana; identical to SEQ ID NO: 41581
  peptide (1)..(585): Ceres Seq. ID no. 13617608

SEQ ID NO: 116871 - protein, 508 aa, Arabidopsis thaliana; identical to SEQ ID NO: 41582
  peptide (1)..(508): Ceres Seq. ID no. 13617609

SEQ ID NO: 116872 - DNA, 1493 bp, Arabidopsis thaliana; identical to SEQ ID NO: 105633
  misc_feature (1)..(1493): Ceres Seq. ID no. 13617610
  misc_feature (1)..(1493): Ortholog of  Ceres SEQ ID NO 13584744 as cited in SEQ ID NO 69137

SEQ ID NO: 116873 - protein, 425 aa, Arabidopsis thaliana; identical to SEQ ID NO: 105634
  peptide (1)..(425): Ceres Seq. ID no. 13617611

SEQ ID NO: 116874 - protein, 413 aa, Arabidopsis thaliana; identical to SEQ ID NO: 105635
  peptide (1)..(413): Ceres Seq. ID no. 13617612

SEQ ID NO: 116875 - protein, 409 aa, Arabidopsis thaliana; identical to SEQ ID NO: 105636
  peptide (1)..(409): Ceres Seq. ID no. 13617613

SEQ ID NO: 116876 - DNA, 1700 bp, Arabidopsis thaliana; identical to SEQ ID NO: 105637
  misc_feature (1)..(1700): Ceres Seq. ID no. 13617632
  misc_feature (1)..(1700): Ortholog of  Ceres SEQ ID NO 14312069 as cited in SEQ ID NO 59191

SEQ ID NO: 116877 - protein, 484 aa, Arabidopsis thaliana; identical to SEQ ID NO: 105638
  peptide (1)..(484): Ceres Seq. ID no. 13617633

SEQ ID NO: 116878 - protein, 400 aa, Arabidopsis thaliana; identical to SEQ ID NO: 105639
  peptide (1)..(400): Ceres Seq. ID no. 13617634

SEQ ID NO: 116879 - protein, 394 aa, Arabidopsis thaliana; identical to SEQ ID NO: 105640
  peptide (1)..(394): Ceres Seq. ID no. 13617635

SEQ ID NO: 116880 - DNA, 736 bp, Arabidopsis thaliana; identical to SEQ ID NO: 105641
  misc_feature (1)..(736): Ceres Seq. ID no. 13617674
  misc_feature (1)..(736): Ortholog of  Ceres SEQ ID NO 12617704 as cited in SEQ ID NO 65314

SEQ ID NO: 116881 - protein, 184 aa, Arabidopsis thaliana; identical to SEQ ID NO: 105642
  peptide (1)..(184): Ceres Seq. ID no. 13617675

SEQ ID NO: 116882 - DNA, 1220 bp, Arabidopsis thaliana; identical to SEQ ID NO: 105643
  misc_feature (1)..(1220): Ceres Seq. ID no. 13617676
  misc_feature (1)..(1220): Ortholog of  Ceres SEQ ID NO 15180785 as cited in SEQ ID NO 0

SEQ ID NO: 116883 - protein, 353 aa, Arabidopsis thaliana; identical to SEQ ID NO: 105644
  peptide (1)..(353): Ceres Seq. ID no. 13617677

SEQ ID NO: 116884 - protein, 305 aa, Arabidopsis thaliana; identical to SEQ ID NO: 73191
  peptide (1)..(305): Ceres Seq. ID no. 13617678

SEQ ID NO: 116885 - protein, 300 aa, Arabidopsis thaliana; identical to SEQ ID NO: 105646
  peptide (1)..(300): Ceres Seq. ID no. 13617679

SEQ ID NO: 116886 - DNA, 1374 bp, Arabidopsis thaliana; identical to SEQ ID NO: 105647
  misc_feature (1)..(1374): Ceres Seq. ID no. 13617680
  misc_feature (1)..(1374): Ortholog of  Ceres SEQ ID NO 14302008 as cited in SEQ ID NO 56021

SEQ ID NO: 116887 - protein, 318 aa, Arabidopsis thaliana; identical to SEQ ID NO: 105648
  peptide (1)..(318): Ceres Seq. ID no. 13617681

SEQ ID NO: 116888 - protein, 210 aa, Arabidopsis thaliana; identical to SEQ ID NO: 76409
  peptide (1)..(210): Ceres Seq. ID no. 13617682

SEQ ID NO: 116889 - protein, 179 aa, Arabidopsis thaliana; identical to SEQ ID NO: 76410
  peptide (1)..(179): Ceres Seq. ID no. 13617683

SEQ ID NO: 116890 - DNA, 1151 bp, Arabidopsis thaliana; identical to SEQ ID NO: 105651
  misc_feature (1)..(1151): Ceres Seq. ID no. 13617694
  misc_feature (1)..(1151): Ortholog of  Ceres SEQ ID NO 15224330 as cited in SEQ ID NO 58808

SEQ ID NO: 116891 - protein, 343 aa, Arabidopsis thaliana; identical to SEQ ID NO: 40486
  peptide (1)..(343): Ceres Seq. ID no. 13617695

SEQ ID NO: 116892 - protein, 335 aa, Arabidopsis thaliana; identical to SEQ ID NO: 40487
  peptide (1)..(335): Ceres Seq. ID no. 13617696

SEQ ID NO: 116893 - protein, 307 aa, Arabidopsis thaliana; identical to SEQ ID NO: 40488
  peptide (1)..(307): Ceres Seq. ID no. 13617697

SEQ ID NO: 116894 - DNA, 1295 bp, Arabidopsis thaliana; identical to SEQ ID NO: 105655
  misc_feature (1)..(1295): Ceres Seq. ID no. 13617698
  misc_feature (1)..(1295): Ortholog of  Ceres SEQ ID NO 13656147 as cited in SEQ ID NO 64422
  misc_feature (1)..(1295): Ortholog of  Ceres SEQ ID NO 13596496 as cited in SEQ ID NO 68639

SEQ ID NO: 116895 - protein, 309 aa, Arabidopsis thaliana; identical to SEQ ID NO: 28173
  peptide (1)..(309): Ceres Seq. ID no. 13617699

SEQ ID NO: 116896 - protein, 278 aa, Arabidopsis thaliana; identical to SEQ ID NO: 28174
  peptide (1)..(278): Ceres Seq. ID no. 13617700

SEQ ID NO: 116897 - protein, 271 aa, Arabidopsis thaliana; identical to SEQ ID NO: 28175
  peptide (1)..(271): Ceres Seq. ID no. 13617701

SEQ ID NO: 116898 - DNA, 1635 bp, Arabidopsis thaliana; identical to SEQ ID NO: 105659
  misc_feature (1)..(1635): Ceres Seq. ID no. 13617708
  misc_feature (1)..(1635): Ortholog of  Ceres SEQ ID NO 13659033 as cited in SEQ ID NO 66372
  misc_feature (1)..(1635): Ortholog of  Ceres SEQ ID NO 13655724 as cited in SEQ ID NO 68973
  misc_feature (1)..(1635): Ortholog of  Ceres SEQ ID NO 12625899 as cited in SEQ ID NO 69079

SEQ ID NO: 116899 - protein, 449 aa, Arabidopsis thaliana; identical to SEQ ID NO: 38720
  peptide (1)..(449): Ceres Seq. ID no. 13617709

SEQ ID NO: 116900 - protein, 424 aa, Arabidopsis thaliana; identical to SEQ ID NO: 38721
  peptide (1)..(424): Ceres Seq. ID no. 13617710

SEQ ID NO: 116901 - protein, 314 aa, Arabidopsis thaliana; identical to SEQ ID NO: 38722
  peptide (1)..(314): Ceres Seq. ID no. 13617711

SEQ ID NO: 116902 - DNA, 2115 bp, Arabidopsis thaliana; identical to SEQ ID NO: 105663
  misc_feature (1)..(2115): Ceres Seq. ID no. 13617712
  misc_feature (1)..(2115): Ortholog of  Ceres SEQ ID NO 14315473 as cited in SEQ ID NO 57173

SEQ ID NO: 116903 - protein, 513 aa, Arabidopsis thaliana; identical to SEQ ID NO: 42328
  peptide (1)..(513): Ceres Seq. ID no. 13617713

SEQ ID NO: 116904 - protein, 509 aa, Arabidopsis thaliana; identical to SEQ ID NO: 42329
  peptide (1)..(509): Ceres Seq. ID no. 13617714

SEQ ID NO: 116905 - protein, 499 aa, Arabidopsis thaliana; identical to SEQ ID NO: 42330
  peptide (1)..(499): Ceres Seq. ID no. 13617715

SEQ ID NO: 116906 - DNA, 1728 bp, Arabidopsis thaliana; identical to SEQ ID NO: 105667
  misc_feature (1)..(1728): Ceres Seq. ID no. 13617720
  misc_feature (1)..(1728): Ortholog of  Ceres SEQ ID NO 13599900 as cited in SEQ ID NO 531
  misc_feature (1)..(1728): Ortholog of  Ceres SEQ ID NO 13596509 as cited in SEQ ID NO 62004
  misc_feature (1)..(1728): Ortholog of  Ceres SEQ ID NO 13659971 as cited in SEQ ID NO 67565
  misc_feature (1)..(1728): Ortholog of  Ceres SEQ ID NO 13500385 as cited in SEQ ID NO 67583

SEQ ID NO: 116907 - protein, 421 aa, Arabidopsis thaliana; identical to SEQ ID NO: 85000
  peptide (1)..(421): Ceres Seq. ID no. 13617721

SEQ ID NO: 116908 - protein, 413 aa, Arabidopsis thaliana; identical to SEQ ID NO: 85001
  peptide (1)..(413): Ceres Seq. ID no. 13617722

SEQ ID NO: 116909 - protein, 369 aa, Arabidopsis thaliana; identical to SEQ ID NO: 85002
  peptide (1)..(369): Ceres Seq. ID no. 13617723

SEQ ID NO: 116910 - DNA, 1217 bp, Arabidopsis thaliana; identical to SEQ ID NO: 105671
  misc_feature (1)..(1217): Ceres Seq. ID no. 13617736
  misc_feature (1)..(1217): Ortholog of  Ceres SEQ ID NO 13598427 as cited in SEQ ID NO 60899

SEQ ID NO: 116911 - protein, 209 aa, Arabidopsis thaliana; identical to SEQ ID NO: 30712
  peptide (1)..(209): Ceres Seq. ID no. 13617737

SEQ ID NO: 116912 - protein, 149 aa, Arabidopsis thaliana; identical to SEQ ID NO: 30713
  peptide (1)..(149): Ceres Seq. ID no. 13617738

SEQ ID NO: 116913 - DNA, 2007 bp, Arabidopsis thaliana; identical to SEQ ID NO: 105674
  misc_feature (1)..(2007): Ceres Seq. ID no. 13617745
  misc_feature (1)..(2007): Ortholog of  Ceres SEQ ID NO 14311103 as cited in SEQ ID NO 52897

SEQ ID NO: 116914 - protein, 550 aa, Arabidopsis thaliana; identical to SEQ ID NO: 105675
  peptide (1)..(550): Ceres Seq. ID no. 13617746

SEQ ID NO: 116915 - protein, 474 aa, Arabidopsis thaliana; identical to SEQ ID NO: 105676
  peptide (1)..(474): Ceres Seq. ID no. 13617747

SEQ ID NO: 116916 - protein, 468 aa, Arabidopsis thaliana; identical to SEQ ID NO: 105677
  peptide (1)..(468): Ceres Seq. ID no. 13617748

SEQ ID NO: 116917 - DNA, 1063 bp, Arabidopsis thaliana; identical to SEQ ID NO: 105678
  misc_feature (1)..(1063): Ceres Seq. ID no. 13617749
  misc_feature (1)..(1063): Ortholog of  Ceres SEQ ID NO 14316161 as cited in SEQ ID NO 52384
  misc_feature (1)..(1063): Ortholog of  Ceres SEQ ID NO 14315249 as cited in SEQ ID NO 52512
  misc_feature (1)..(1063): Ortholog of  Ceres SEQ ID NO 15174595 as cited in SEQ ID NO 53460
  misc_feature (1)..(1063): Ortholog of  Ceres SEQ ID NO 13503553 as cited in SEQ ID NO 64822
  misc_feature (1)..(1063): Ortholog of  Ceres SEQ ID NO 13660155 as cited in SEQ ID NO 67635

SEQ ID NO: 116918 - protein, 305 aa, Arabidopsis thaliana; identical to SEQ ID NO: 105679
  peptide (1)..(305): Ceres Seq. ID no. 13617750

SEQ ID NO: 116919 - protein, 280 aa, Arabidopsis thaliana; identical to SEQ ID NO: 29464
  peptide (1)..(280): Ceres Seq. ID no. 13617751

SEQ ID NO: 116920 - protein, 236 aa, Arabidopsis thaliana; identical to SEQ ID NO: 23607
  peptide (1)..(236): Ceres Seq. ID no. 13617752

SEQ ID NO: 116921 - DNA, 1188 bp, Arabidopsis thaliana; identical to SEQ ID NO: 105682
  misc_feature (1)..(1188): Ceres Seq. ID no. 13617766
  misc_feature (1)..(1188): Ortholog of  Ceres SEQ ID NO 13654574 as cited in SEQ ID NO 68569

SEQ ID NO: 116922 - protein, 319 aa, Arabidopsis thaliana; identical to SEQ ID NO: 105683
  peptide (1)..(319): Ceres Seq. ID no. 13617767

SEQ ID NO: 116923 - protein, 304 aa, Arabidopsis thaliana; identical to SEQ ID NO: 105684
  peptide (1)..(304): Ceres Seq. ID no. 13617768

SEQ ID NO: 116924 - protein, 247 aa, Arabidopsis thaliana; identical to SEQ ID NO: 105685
  peptide (1)..(247): Ceres Seq. ID no. 13617769

SEQ ID NO: 116925 - DNA, 987 bp, Arabidopsis thaliana; identical to SEQ ID NO: 105686
  misc_feature (1)..(987): Ceres Seq. ID no. 13617784
  misc_feature (1)..(987): Ortholog of  Ceres SEQ ID NO 15174396 as cited in SEQ ID NO 0

SEQ ID NO: 116926 - protein, 289 aa, Arabidopsis thaliana; identical to SEQ ID NO: 105687
  peptide (1)..(289): Ceres Seq. ID no. 13617785

SEQ ID NO: 116927 - protein, 240 aa, Arabidopsis thaliana; identical to SEQ ID NO: 22523
  peptide (1)..(240): Ceres Seq. ID no. 13617786

SEQ ID NO: 116928 - protein, 192 aa, Arabidopsis thaliana; identical to SEQ ID NO: 22524
  peptide (1)..(192): Ceres Seq. ID no. 13617787

SEQ ID NO: 116929 - DNA, 1494 bp, Arabidopsis thaliana; identical to SEQ ID NO: 105690
  misc_feature (1)..(1494): Ceres Seq. ID no. 13617788
  misc_feature (1)..(1494): Ortholog of  Ceres SEQ ID NO 15169533 as cited in SEQ ID NO 67374

SEQ ID NO: 116930 - protein, 452 aa, Arabidopsis thaliana; identical to SEQ ID NO: 105691
  peptide (1)..(452): Ceres Seq. ID no. 13617789

SEQ ID NO: 116931 - protein, 404 aa, Arabidopsis thaliana; identical to SEQ ID NO: 105692
  peptide (1)..(404): Ceres Seq. ID no. 13617790

SEQ ID NO: 116932 - protein, 400 aa, Arabidopsis thaliana; identical to SEQ ID NO: 105693
  peptide (1)..(400): Ceres Seq. ID no. 13617791

SEQ ID NO: 116933 - DNA, 1405 bp, Arabidopsis thaliana; identical to SEQ ID NO: 105694
  misc_feature (1)..(1405): Ceres Seq. ID no. 13617796
  misc_feature (1)..(1405): Ortholog of  Ceres SEQ ID NO 12590542 as cited in SEQ ID NO 621
  misc_feature (1)..(1405): Ortholog of  Ceres SEQ ID NO 12421854 as cited in SEQ ID NO 20723
  misc_feature (1)..(1405): Ortholog of  Ceres SEQ ID NO 13597847 as cited in SEQ ID NO 64858

SEQ ID NO: 116934 - protein, 368 aa, Arabidopsis thaliana; identical to SEQ ID NO: 105695
  peptide (1)..(368): Ceres Seq. ID no. 13617797

SEQ ID NO: 116935 - protein, 365 aa, Arabidopsis thaliana; identical to SEQ ID NO: 105696
  peptide (1)..(365): Ceres Seq. ID no. 13617798

SEQ ID NO: 116936 - protein, 347 aa, Arabidopsis thaliana; identical to SEQ ID NO: 105697
  peptide (1)..(347): Ceres Seq. ID no. 13617799

SEQ ID NO: 116937 - DNA, 1710 bp, Arabidopsis thaliana; identical to SEQ ID NO: 105698
  misc_feature (1)..(1710): Ceres Seq. ID no. 13617800
  misc_feature (1)..(1710): Ortholog of  Ceres SEQ ID NO 12779893 as cited in SEQ ID NO 66238

SEQ ID NO: 116938 - protein, 504 aa, Arabidopsis thaliana; identical to SEQ ID NO: 105699
  peptide (1)..(504): Ceres Seq. ID no. 13617801

SEQ ID NO: 116939 - protein, 461 aa, Arabidopsis thaliana; identical to SEQ ID NO: 105700
  peptide (1)..(461): Ceres Seq. ID no. 13617802

SEQ ID NO: 116940 - protein, 452 aa, Arabidopsis thaliana; identical to SEQ ID NO: 105701
  peptide (1)..(452): Ceres Seq. ID no. 13617803

SEQ ID NO: 116941 - DNA, 892 bp, Arabidopsis thaliana; identical to SEQ ID NO: 105702
  misc_feature (1)..(892): Ceres Seq. ID no. 13617804
  misc_feature (1)..(892): Ortholog of  Ceres SEQ ID NO 12610385 as cited in SEQ ID NO 55938
  misc_feature (1)..(892): Ortholog of  Ceres SEQ ID NO 13661939 as cited in SEQ ID NO 61170
  misc_feature (1)..(892): Ortholog of  Ceres SEQ ID NO 14309041 as cited in SEQ ID NO 0
  misc_feature (1)..(892): Ortholog of  Ceres SEQ ID NO 14309611 as cited in SEQ ID NO 0

SEQ ID NO: 116942 - protein, 175 aa, Arabidopsis thaliana; identical to SEQ ID NO: 25636
  peptide (1)..(175): Ceres Seq. ID no. 13617805

SEQ ID NO: 116943 - protein, 144 aa, Arabidopsis thaliana; identical to SEQ ID NO: 25637
  peptide (1)..(144): Ceres Seq. ID no. 13617806

SEQ ID NO: 116944 - DNA, 868 bp, Arabidopsis thaliana; identical to SEQ ID NO: 105705
  misc_feature (1)..(868): Ceres Seq. ID no. 13617807
  misc_feature (1)..(868): Ortholog of  Ceres SEQ ID NO 15178887 as cited in SEQ ID NO 1099
  misc_feature (1)..(868): Ortholog of  Ceres SEQ ID NO 15177541 as cited in SEQ ID NO 0

SEQ ID NO: 116945 - protein, 255 aa, Arabidopsis thaliana; identical to SEQ ID NO: 22051
  peptide (1)..(255): Ceres Seq. ID no. 13617808

SEQ ID NO: 116946 - protein, 241 aa, Arabidopsis thaliana; identical to SEQ ID NO: 22052
  peptide (1)..(241): Ceres Seq. ID no. 13617809

SEQ ID NO: 116947 - protein, 138 aa, Arabidopsis thaliana; identical to SEQ ID NO: 22053
  peptide (1)..(138): Ceres Seq. ID no. 13617810

SEQ ID NO: 116948 - DNA, 844 bp, Arabidopsis thaliana; identical to SEQ ID NO: 105709
  misc_feature (1)..(844): Ceres Seq. ID no. 13617827
  misc_feature (1)..(844): Ortholog of  Ceres SEQ ID NO 13638838 as cited in SEQ ID NO 52011
  misc_feature (1)..(844): Ortholog of  Ceres SEQ ID NO 13585554 as cited in SEQ ID NO 64455

SEQ ID NO: 116949 - protein, 209 aa, Arabidopsis thaliana; identical to SEQ ID NO: 105710
  peptide (1)..(209): Ceres Seq. ID no. 13617828

SEQ ID NO: 116950 - protein, 170 aa, Arabidopsis thaliana; identical to SEQ ID NO: 35053
  peptide (1)..(170): Ceres Seq. ID no. 13617829

SEQ ID NO: 116951 - protein, 113 aa, Arabidopsis thaliana; identical to SEQ ID NO: 35054
  peptide (1)..(113): Ceres Seq. ID no. 13617830

SEQ ID NO: 116952 - DNA, 715 bp, Arabidopsis thaliana; identical to SEQ ID NO: 105713
  misc_feature (1)..(715): Ceres Seq. ID no. 13617831
  misc_feature (1)..(715): Ortholog of  Ceres SEQ ID NO 14309653 as cited in SEQ ID NO 0

SEQ ID NO: 116953 - protein, 128 aa, Arabidopsis thaliana; identical to SEQ ID NO: 22375
  peptide (1)..(128): Ceres Seq. ID no. 13617832

SEQ ID NO: 116954 - protein, 73 aa, Arabidopsis thaliana; identical to SEQ ID NO: 22376
  peptide (1)..(73): Ceres Seq. ID no. 13617833

SEQ ID NO: 116955 - DNA, 1955 bp, Arabidopsis thaliana; identical to SEQ ID NO: 105716
  misc_feature (1)..(1955): Ceres Seq. ID no. 13617838
  misc_feature (1)..(1955): Ortholog of  Ceres SEQ ID NO 14308413 as cited in SEQ ID NO 55196

SEQ ID NO: 116956 - protein, 600 aa, Arabidopsis thaliana; identical to SEQ ID NO: 105717
  peptide (1)..(600): Ceres Seq. ID no. 13617839

SEQ ID NO: 116957 - protein, 590 aa, Arabidopsis thaliana; identical to SEQ ID NO: 105718
  peptide (1)..(590): Ceres Seq. ID no. 13617840

SEQ ID NO: 116958 - protein, 552 aa, Arabidopsis thaliana; identical to SEQ ID NO: 23115
  peptide (1)..(552): Ceres Seq. ID no. 13617841

SEQ ID NO: 116959 - DNA, 1276 bp, Arabidopsis thaliana; identical to SEQ ID NO: 105720
  misc_feature (1)..(1276): Ceres Seq. ID no. 13617842
  misc_feature (1)..(1276): Ortholog of  Ceres SEQ ID NO 13598495 as cited in SEQ ID NO 63939

SEQ ID NO: 116960 - protein, 355 aa, Arabidopsis thaliana; identical to SEQ ID NO: 22619
  peptide (1)..(355): Ceres Seq. ID no. 13617843

SEQ ID NO: 116961 - protein, 344 aa, Arabidopsis thaliana; identical to SEQ ID NO: 22620
  peptide (1)..(344): Ceres Seq. ID no. 13617844

SEQ ID NO: 116962 - protein, 215 aa, Arabidopsis thaliana; identical to SEQ ID NO: 22621
  peptide (1)..(215): Ceres Seq. ID no. 13617845

SEQ ID NO: 116963 - DNA, 1212 bp, Arabidopsis thaliana; identical to SEQ ID NO: 105724
  misc_feature (1)..(1212): Ceres Seq. ID no. 13617850
  misc_feature (1)..(1212): Ortholog of  Ceres SEQ ID NO 12598859 as cited in SEQ ID NO 62872
  misc_feature (1)..(1212): Ortholog of  Ceres SEQ ID NO 12617350 as cited in SEQ ID NO 63777
  misc_feature (1)..(1212): Ortholog of  Ceres SEQ ID NO 13598749 as cited in SEQ ID NO 64341
  misc_feature (1)..(1212): Ortholog of  Ceres SEQ ID NO 15176153 as cited in SEQ ID NO 0
  misc_feature (1)..(1212): Ortholog of  Ceres SEQ ID NO 15179157 as cited in SEQ ID NO 0

SEQ ID NO: 116964 - protein, 314 aa, Arabidopsis thaliana; identical to SEQ ID NO: 26705
  peptide (1)..(314): Ceres Seq. ID no. 13617851

SEQ ID NO: 116965 - DNA, 1331 bp, Arabidopsis thaliana; identical to SEQ ID NO: 105726
  misc_feature (1)..(1331): Ceres Seq. ID no. 13617860
  misc_feature (1)..(1331): Ortholog of  Ceres SEQ ID NO 14314327 as cited in SEQ ID NO 57354

SEQ ID NO: 116966 - protein, 310 aa, Arabidopsis thaliana; identical to SEQ ID NO: 105727
  peptide (1)..(310): Ceres Seq. ID no. 13617861

SEQ ID NO: 116967 - protein, 304 aa, Arabidopsis thaliana; identical to SEQ ID NO: 105728
  peptide (1)..(304): Ceres Seq. ID no. 13617862

SEQ ID NO: 116968 - protein, 180 aa, Arabidopsis thaliana; identical to SEQ ID NO: 41784
  peptide (1)..(180): Ceres Seq. ID no. 13617863

SEQ ID NO: 116969 - DNA, 2006 bp, Arabidopsis thaliana; identical to SEQ ID NO: 105730
  misc_feature (1)..(2006): Ceres Seq. ID no. 13617874
  misc_feature (1)..(2006): Ortholog of  Ceres SEQ ID NO 12613725 as cited in SEQ ID NO 68196

SEQ ID NO: 116970 - protein, 585 aa, Arabidopsis thaliana; identical to SEQ ID NO: 23352
  peptide (1)..(585): Ceres Seq. ID no. 13617875

SEQ ID NO: 116971 - protein, 459 aa, Arabidopsis thaliana; identical to SEQ ID NO: 23353
  peptide (1)..(459): Ceres Seq. ID no. 13617876

SEQ ID NO: 116972 - protein, 427 aa, Arabidopsis thaliana; identical to SEQ ID NO: 23354
  peptide (1)..(427): Ceres Seq. ID no. 13617877

SEQ ID NO: 116973 - DNA, 1320 bp, Arabidopsis thaliana; identical to SEQ ID NO: 105734
  misc_feature (1)..(1320): Ceres Seq. ID no. 13617890
  misc_feature (1)..(1320): Ortholog of  Ceres SEQ ID NO 14302314 as cited in SEQ ID NO 62543
  misc_feature (1)..(1320): Ortholog of  Ceres SEQ ID NO 13598391 as cited in SEQ ID NO 62769

SEQ ID NO: 116974 - protein, 303 aa, Arabidopsis thaliana; identical to SEQ ID NO: 28982
  peptide (1)..(303): Ceres Seq. ID no. 13617891

SEQ ID NO: 116975 - protein, 289 aa, Arabidopsis thaliana; identical to SEQ ID NO: 28983
  peptide (1)..(289): Ceres Seq. ID no. 13617892

SEQ ID NO: 116976 - protein, 288 aa, Arabidopsis thaliana; identical to SEQ ID NO: 28984
  peptide (1)..(288): Ceres Seq. ID no. 13617893

SEQ ID NO: 116977 - DNA, 2197 bp, Arabidopsis thaliana; identical to SEQ ID NO: 105738
  misc_feature (1)..(2197): Ceres Seq. ID no. 13617897
  misc_feature (1)..(2197): Ortholog of  Ceres SEQ ID NO 14310639 as cited in SEQ ID NO 53858
  misc_feature (1)..(2197): Ortholog of  Ceres SEQ ID NO 14312851 as cited in SEQ ID NO 58364

SEQ ID NO: 116978 - protein, 677 aa, Arabidopsis thaliana; identical to SEQ ID NO: 105739
  peptide (1)..(677): Ceres Seq. ID no. 13617898

SEQ ID NO: 116979 - protein, 650 aa, Arabidopsis thaliana; identical to SEQ ID NO: 105740
  peptide (1)..(650): Ceres Seq. ID no. 13617899

SEQ ID NO: 116980 - protein, 649 aa, Arabidopsis thaliana; identical to SEQ ID NO: 105741
  peptide (1)..(649): Ceres Seq. ID no. 13617900

SEQ ID NO: 116981 - DNA, 1503 bp, Arabidopsis thaliana; identical to SEQ ID NO: 105742
  misc_feature (1)..(1503): Ceres Seq. ID no. 13617901
  misc_feature (1)..(1503): Ortholog of  Ceres SEQ ID NO 15176862 as cited in SEQ ID NO 67415

SEQ ID NO: 116982 - protein, 490 aa, Arabidopsis thaliana; identical to SEQ ID NO: 105743
  peptide (1)..(490): Ceres Seq. ID no. 13617902

SEQ ID NO: 116983 - protein, 485 aa, Arabidopsis thaliana; identical to SEQ ID NO: 105744
  peptide (1)..(485): Ceres Seq. ID no. 13617903

SEQ ID NO: 116984 - protein, 474 aa, Arabidopsis thaliana; identical to SEQ ID NO: 105745
  peptide (1)..(474): Ceres Seq. ID no. 13617904

SEQ ID NO: 116985 - DNA, 1255 bp, Arabidopsis thaliana; identical to SEQ ID NO: 105746
  misc_feature (1)..(1255): Ceres Seq. ID no. 13617905
  misc_feature (1)..(1255): Ortholog of  Ceres SEQ ID NO 13595616 as cited in SEQ ID NO 59854

SEQ ID NO: 116986 - protein, 355 aa, Arabidopsis thaliana; identical to SEQ ID NO: 21490
  peptide (1)..(355): Ceres Seq. ID no. 13617906

SEQ ID NO: 116987 - protein, 353 aa, Arabidopsis thaliana; identical to SEQ ID NO: 21491
  peptide (1)..(353): Ceres Seq. ID no. 13617907

SEQ ID NO: 116988 - protein, 221 aa, Arabidopsis thaliana; identical to SEQ ID NO: 21492
  peptide (1)..(221): Ceres Seq. ID no. 13617908

SEQ ID NO: 116989 - DNA, 915 bp, Arabidopsis thaliana; identical to SEQ ID NO: 105750
  misc_feature (1)..(915): Ceres Seq. ID no. 13617909
  misc_feature (1)..(915): Ortholog of  Ceres SEQ ID NO 14310243 as cited in SEQ ID NO 20666

SEQ ID NO: 116990 - protein, 221 aa, Arabidopsis thaliana; identical to SEQ ID NO: 105751
  peptide (1)..(221): Ceres Seq. ID no. 13617910

SEQ ID NO: 116991 - protein, 172 aa, Arabidopsis thaliana; identical to SEQ ID NO: 105752
  peptide (1)..(172): Ceres Seq. ID no. 13617911

SEQ ID NO: 116992 - protein, 126 aa, Arabidopsis thaliana; identical to SEQ ID NO: 70719
  peptide (1)..(126): Ceres Seq. ID no. 13617912

SEQ ID NO: 116993 - DNA, 1480 bp, Arabidopsis thaliana; identical to SEQ ID NO: 105754
  misc_feature (1)..(1480): Ceres Seq. ID no. 13617913
  misc_feature (1)..(1480): Ortholog of  Ceres SEQ ID NO 15177012 as cited in SEQ ID NO 56256
  misc_feature (1)..(1480): Ortholog of  Ceres SEQ ID NO 13596509 as cited in SEQ ID NO 62004
  misc_feature (1)..(1480): Ortholog of  Ceres SEQ ID NO 13500385 as cited in SEQ ID NO 67583

SEQ ID NO: 116994 - protein, 343 aa, Arabidopsis thaliana; identical to SEQ ID NO: 38544
  peptide (1)..(343): Ceres Seq. ID no. 13617914

SEQ ID NO: 116995 - protein, 294 aa, Arabidopsis thaliana; identical to SEQ ID NO: 38545
  peptide (1)..(294): Ceres Seq. ID no. 13617915

SEQ ID NO: 116996 - protein, 267 aa, Arabidopsis thaliana; identical to SEQ ID NO: 38546
  peptide (1)..(267): Ceres Seq. ID no. 13617916

SEQ ID NO: 116997 - DNA, 820 bp, Arabidopsis thaliana; identical to SEQ ID NO: 105758
  misc_feature (1)..(820): Ceres Seq. ID no. 13617920
  misc_feature (1)..(820): Ortholog of  Ceres SEQ ID NO 14301603 as cited in SEQ ID NO 67721
  misc_feature (1)..(820): Ortholog of  Ceres SEQ ID NO 13596128 as cited in SEQ ID NO 67831

SEQ ID NO: 116998 - protein, 225 aa, Arabidopsis thaliana; identical to SEQ ID NO: 30613
  peptide (1)..(225): Ceres Seq. ID no. 13617921

SEQ ID NO: 116999 - protein, 220 aa, Arabidopsis thaliana; identical to SEQ ID NO: 30614
  peptide (1)..(220): Ceres Seq. ID no. 13617922

SEQ ID NO: 117000 - protein, 207 aa, Arabidopsis thaliana; identical to SEQ ID NO: 30615
  peptide (1)..(207): Ceres Seq. ID no. 13617923

SEQ ID NO: 117001 - DNA, 1295 bp, Arabidopsis thaliana; identical to SEQ ID NO: 105762
  misc_feature (1)..(1295): Ceres Seq. ID no. 13617926
  misc_feature (1)..(1295): Ortholog of  Ceres SEQ ID NO 14313583 as cited in SEQ ID NO 55431
  misc_feature (1)..(1295): Ortholog of  Ceres SEQ ID NO 12476493 as cited in SEQ ID NO 58163
  misc_feature (1)..(1295): Ortholog of  Ceres SEQ ID NO 12617090 as cited in SEQ ID NO 64005
  misc_feature (1)..(1295): Ortholog of  Ceres SEQ ID NO 13597233 as cited in SEQ ID NO 64370
  misc_feature (1)..(1295): Ortholog of  Ceres SEQ ID NO 14302844 as cited in SEQ ID NO 65379
  misc_feature (1)..(1295): Ortholog of  Ceres SEQ ID NO 15226354 as cited in SEQ ID NO 0

SEQ ID NO: 117002 - protein, 349 aa, Arabidopsis thaliana; identical to SEQ ID NO: 43183
  peptide (1)..(349): Ceres Seq. ID no. 13617927

SEQ ID NO: 117003 - protein, 329 aa, Arabidopsis thaliana; identical to SEQ ID NO: 43184
  peptide (1)..(329): Ceres Seq. ID no. 13617928

SEQ ID NO: 117004 - protein, 307 aa, Arabidopsis thaliana; identical to SEQ ID NO: 43185
  peptide (1)..(307): Ceres Seq. ID no. 13617929

SEQ ID NO: 117005 - DNA, 857 bp, Arabidopsis thaliana; identical to SEQ ID NO: 105766
  misc_feature (1)..(857): Ceres Seq. ID no. 13617930
  misc_feature (1)..(857): Ortholog of  Ceres SEQ ID NO 12610554 as cited in SEQ ID NO 59805
  misc_feature (1)..(857): Ortholog of  Ceres SEQ ID NO 12614051 as cited in SEQ ID NO 67827

SEQ ID NO: 117006 - protein, 232 aa, Arabidopsis thaliana; identical to SEQ ID NO: 105767
  peptide (1)..(232): Ceres Seq. ID no. 13617931

SEQ ID NO: 117007 - protein, 225 aa, Arabidopsis thaliana; identical to SEQ ID NO: 105768
  peptide (1)..(225): Ceres Seq. ID no. 13617932

SEQ ID NO: 117008 - protein, 142 aa, Arabidopsis thaliana; identical to SEQ ID NO: 105769
  peptide (1)..(142): Ceres Seq. ID no. 13617933

SEQ ID NO: 117009 - DNA, 1676 bp, Arabidopsis thaliana; identical to SEQ ID NO: 105770
  misc_feature (1)..(1676): Ceres Seq. ID no. 13617934
  misc_feature (1)..(1676): Ortholog of  Ceres SEQ ID NO 13597546 as cited in SEQ ID NO 65017
  misc_feature (1)..(1676): Ortholog of  Ceres SEQ ID NO 14307912 as cited in SEQ ID NO 66380
  misc_feature (1)..(1676): Ortholog of  Ceres SEQ ID NO 14308045 as cited in SEQ ID NO 67444
  misc_feature (1)..(1676): Ortholog of  Ceres SEQ ID NO 13654353 as cited in SEQ ID NO 68318

SEQ ID NO: 117010 - protein, 479 aa, Arabidopsis thaliana; identical to SEQ ID NO: 24496
  peptide (1)..(479): Ceres Seq. ID no. 13617935

SEQ ID NO: 117011 - protein, 471 aa, Arabidopsis thaliana; identical to SEQ ID NO: 24497
  peptide (1)..(471): Ceres Seq. ID no. 13617936

SEQ ID NO: 117012 - protein, 469 aa, Arabidopsis thaliana; identical to SEQ ID NO: 24498
  peptide (1)..(469): Ceres Seq. ID no. 13617937

SEQ ID NO: 117013 - DNA, 943 bp, Arabidopsis thaliana; identical to SEQ ID NO: 105774
  misc_feature (1)..(943): Ceres Seq. ID no. 13617946
  misc_feature (1)..(943): Ortholog of  Ceres SEQ ID NO 13594593 as cited in SEQ ID NO 52026

SEQ ID NO: 117014 - protein, 254 aa, Arabidopsis thaliana; identical to SEQ ID NO: 105775
  peptide (1)..(254): Ceres Seq. ID no. 13617947

SEQ ID NO: 117015 - protein, 241 aa, Arabidopsis thaliana; identical to SEQ ID NO: 22013
  peptide (1)..(241): Ceres Seq. ID no. 13617948

SEQ ID NO: 117016 - protein, 167 aa, Arabidopsis thaliana; identical to SEQ ID NO: 22014
  peptide (1)..(167): Ceres Seq. ID no. 13617949

SEQ ID NO: 117017 - DNA, 832 bp, Arabidopsis thaliana; identical to SEQ ID NO: 105778
  misc_feature (1)..(832): Ceres Seq. ID no. 13617970
  misc_feature (1)..(832): Ortholog of  Ceres SEQ ID NO 12616324 as cited in SEQ ID NO 63414

SEQ ID NO: 117018 - protein, 238 aa, Arabidopsis thaliana; identical to SEQ ID NO: 25832
  peptide (1)..(238): Ceres Seq. ID no. 13617971

SEQ ID NO: 117019 - protein, 176 aa, Arabidopsis thaliana; identical to SEQ ID NO: 25833
  peptide (1)..(176): Ceres Seq. ID no. 13617972

SEQ ID NO: 117020 - DNA, 976 bp, Arabidopsis thaliana; identical to SEQ ID NO: 105781
  misc_feature (1)..(976): Ceres Seq. ID no. 13617991
  misc_feature (1)..(976): Ortholog of  Ceres SEQ ID NO 12557432 as cited in SEQ ID NO 92
  misc_feature (1)..(976): Ortholog of  Ceres SEQ ID NO 15224319 as cited in SEQ ID NO 66044
  misc_feature (1)..(976): Ortholog of  Ceres SEQ ID NO 13598045 as cited in SEQ ID NO 66822

SEQ ID NO: 117021 - protein, 157 aa, Arabidopsis thaliana; identical to SEQ ID NO: 49829
  peptide (1)..(157): Ceres Seq. ID no. 13617992

SEQ ID NO: 117022 - protein, 118 aa, Arabidopsis thaliana; identical to SEQ ID NO: 49830
  peptide (1)..(118): Ceres Seq. ID no. 13617993

SEQ ID NO: 117023 - protein, 235 aa, Arabidopsis thaliana; identical to SEQ ID NO: 49828
  peptide (1)..(235): Ceres Seq. ID no. 13617994

SEQ ID NO: 117024 - DNA, 1523 bp, Arabidopsis thaliana; identical to SEQ ID NO: 105785
  misc_feature (1)..(1523): Ceres Seq. ID no. 13617999
  misc_feature (1)..(1523): Ortholog of  Ceres SEQ ID NO 12784228 as cited in SEQ ID NO 66111

SEQ ID NO: 117025 - protein, 379 aa, Arabidopsis thaliana; identical to SEQ ID NO: 21914
  peptide (1)..(379): Ceres Seq. ID no. 13618000

SEQ ID NO: 117026 - protein, 322 aa, Arabidopsis thaliana; identical to SEQ ID NO: 21915
  peptide (1)..(322): Ceres Seq. ID no. 13618001

SEQ ID NO: 117027 - protein, 276 aa, Arabidopsis thaliana; identical to SEQ ID NO: 21916
  peptide (1)..(276): Ceres Seq. ID no. 13618002

SEQ ID NO: 117028 - DNA, 2513 bp, Arabidopsis thaliana; identical to SEQ ID NO: 105789
  misc_feature (1)..(2513): Ceres Seq. ID no. 13618003
  misc_feature (1)..(2513): Ortholog of  Ceres SEQ ID NO 14308455 as cited in SEQ ID NO 55108

SEQ ID NO: 117029 - protein, 528 aa, Arabidopsis thaliana; identical to SEQ ID NO: 20813
  peptide (1)..(528): Ceres Seq. ID no. 13618004

SEQ ID NO: 117030 - protein, 513 aa, Arabidopsis thaliana; identical to SEQ ID NO: 20814
  peptide (1)..(513): Ceres Seq. ID no. 13618005

SEQ ID NO: 117031 - protein, 494 aa, Arabidopsis thaliana; identical to SEQ ID NO: 20815
  peptide (1)..(494): Ceres Seq. ID no. 13618006

SEQ ID NO: 117032 - DNA, 833 bp, Arabidopsis thaliana; identical to SEQ ID NO: 105793
  misc_feature (1)..(833): Ceres Seq. ID no. 13618007
  misc_feature (1)..(833): Ortholog of  Ceres SEQ ID NO 14308278 as cited in SEQ ID NO 55403
  misc_feature (1)..(833): Ortholog of  Ceres SEQ ID NO 12618176 as cited in SEQ ID NO 64489
  misc_feature (1)..(833): Ortholog of  Ceres SEQ ID NO 15179231 as cited in SEQ ID NO 0

SEQ ID NO: 117033 - protein, 246 aa, Arabidopsis thaliana; identical to SEQ ID NO: 105794
  peptide (1)..(246): Ceres Seq. ID no. 13618008

SEQ ID NO: 117034 - protein, 233 aa, Arabidopsis thaliana; identical to SEQ ID NO: 27022
  peptide (1)..(233): Ceres Seq. ID no. 13618009

SEQ ID NO: 117035 - protein, 213 aa, Arabidopsis thaliana; identical to SEQ ID NO: 27023
  peptide (1)..(213): Ceres Seq. ID no. 13618010

SEQ ID NO: 117036 - DNA, 1308 bp, Arabidopsis thaliana; identical to SEQ ID NO: 105797
  misc_feature (1)..(1308): Ceres Seq. ID no. 13618015
  misc_feature (1)..(1308): Ortholog of  Ceres SEQ ID NO 15169350 as cited in SEQ ID NO 53271

SEQ ID NO: 117037 - protein, 343 aa, Arabidopsis thaliana; identical to SEQ ID NO: 105798
  peptide (1)..(343): Ceres Seq. ID no. 13618016

SEQ ID NO: 117038 - protein, 299 aa, Arabidopsis thaliana; identical to SEQ ID NO: 39734
  peptide (1)..(299): Ceres Seq. ID no. 13618017

SEQ ID NO: 117039 - protein, 271 aa, Arabidopsis thaliana; identical to SEQ ID NO: 39735
  peptide (1)..(271): Ceres Seq. ID no. 13618018

SEQ ID NO: 117040 - DNA, 913 bp, Arabidopsis thaliana; identical to SEQ ID NO: 105801
  misc_feature (1)..(913): Ceres Seq. ID no. 13618023
  misc_feature (1)..(913): Ortholog of  Ceres SEQ ID NO 13595561 as cited in SEQ ID NO 59869
  misc_feature (1)..(913): Ortholog of  Ceres SEQ ID NO 15174355 as cited in SEQ ID NO 0

SEQ ID NO: 117041 - protein, 183 aa, Arabidopsis thaliana; identical to SEQ ID NO: 23781
  peptide (1)..(183): Ceres Seq. ID no. 13618024

SEQ ID NO: 117042 - DNA, 1336 bp, Arabidopsis thaliana; identical to SEQ ID NO: 105803
  misc_feature (1)..(1336): Ceres Seq. ID no. 13618044
  misc_feature (1)..(1336): Ortholog of  Ceres SEQ ID NO 13597638 as cited in SEQ ID NO 65448
  misc_feature (1)..(1336): Ortholog of  Ceres SEQ ID NO 14302772 as cited in SEQ ID NO 69055

SEQ ID NO: 117043 - protein, 352 aa, Arabidopsis thaliana; identical to SEQ ID NO: 30911
  peptide (1)..(352): Ceres Seq. ID no. 13618045

SEQ ID NO: 117044 - protein, 315 aa, Arabidopsis thaliana; identical to SEQ ID NO: 30912
  peptide (1)..(315): Ceres Seq. ID no. 13618046

SEQ ID NO: 117045 - protein, 212 aa, Arabidopsis thaliana; identical to SEQ ID NO: 30913
  peptide (1)..(212): Ceres Seq. ID no. 13618047

SEQ ID NO: 117046 - DNA, 934 bp, Arabidopsis thaliana; identical to SEQ ID NO: 105807
  misc_feature (1)..(934): Ceres Seq. ID no. 13618061
  misc_feature (1)..(934): Ortholog of  Ceres SEQ ID NO 12781196 as cited in SEQ ID NO 61049

SEQ ID NO: 117047 - protein, 181 aa, Arabidopsis thaliana; identical to SEQ ID NO: 28231
  peptide (1)..(181): Ceres Seq. ID no. 13618062

SEQ ID NO: 117048 - protein, 173 aa, Arabidopsis thaliana; identical to SEQ ID NO: 28232
  peptide (1)..(173): Ceres Seq. ID no. 13618063

SEQ ID NO: 117049 - protein, 140 aa, Arabidopsis thaliana; identical to SEQ ID NO: 28233
  peptide (1)..(140): Ceres Seq. ID no. 13618064

SEQ ID NO: 117050 - DNA, 1663 bp, Arabidopsis thaliana; identical to SEQ ID NO: 105811
  misc_feature (1)..(1663): Ceres Seq. ID no. 13618072
  misc_feature (1)..(1663): Ortholog of  Ceres SEQ ID NO 13648400 as cited in SEQ ID NO 20329
  misc_feature (1)..(1663): Ortholog of  Ceres SEQ ID NO 13659393 as cited in SEQ ID NO 67047
  misc_feature (1)..(1663): Ortholog of  Ceres SEQ ID NO 13654553 as cited in SEQ ID NO 68417
  misc_feature (1)..(1663): Ortholog of  Ceres SEQ ID NO 12635162 as cited in SEQ ID NO 0
  misc_feature (1)..(1663): Ortholog of  Ceres SEQ ID NO 15175178 as cited in SEQ ID NO 0

SEQ ID NO: 117051 - protein, 222 aa, Arabidopsis thaliana; identical to SEQ ID NO: 30065
  peptide (1)..(222): Ceres Seq. ID no. 13618073

SEQ ID NO: 117052 - protein, 210 aa, Arabidopsis thaliana; identical to SEQ ID NO: 30066
  peptide (1)..(210): Ceres Seq. ID no. 13618074

SEQ ID NO: 117053 - DNA, 1215 bp, Arabidopsis thaliana; identical to SEQ ID NO: 105814
  misc_feature (1)..(1215): Ceres Seq. ID no. 13618083
  misc_feature (1)..(1215): Ortholog of  Ceres SEQ ID NO 14302757 as cited in SEQ ID NO 56631

SEQ ID NO: 117054 - protein, 314 aa, Arabidopsis thaliana; identical to SEQ ID NO: 105815
  peptide (1)..(314): Ceres Seq. ID no. 13618084

SEQ ID NO: 117055 - protein, 158 aa, Arabidopsis thaliana; identical to SEQ ID NO: 25545
  peptide (1)..(158): Ceres Seq. ID no. 13618085

SEQ ID NO: 117056 - DNA, 1304 bp, Arabidopsis thaliana; identical to SEQ ID NO: 105817
  misc_feature (1)..(1304): Ceres Seq. ID no. 13618086
  misc_feature (1)..(1304): Ortholog of  Ceres SEQ ID NO 13598387 as cited in SEQ ID NO 62757
  misc_feature (1)..(1304): Ortholog of  Ceres SEQ ID NO 13662984 as cited in SEQ ID NO 64419

SEQ ID NO: 117057 - protein, 354 aa, Arabidopsis thaliana; identical to SEQ ID NO: 105818
  peptide (1)..(354): Ceres Seq. ID no. 13618087

SEQ ID NO: 117058 - protein, 318 aa, Arabidopsis thaliana; identical to SEQ ID NO: 39077
  peptide (1)..(318): Ceres Seq. ID no. 13618088

SEQ ID NO: 117059 - protein, 317 aa, Arabidopsis thaliana; identical to SEQ ID NO: 39078
  peptide (1)..(317): Ceres Seq. ID no. 13618089

SEQ ID NO: 117060 - DNA, 1134 bp, Arabidopsis thaliana; identical to SEQ ID NO: 105821
  misc_feature (1)..(1134): Ceres Seq. ID no. 13618098
  misc_feature (1)..(1134): Ortholog of  Ceres SEQ ID NO 13594298 as cited in SEQ ID NO 57803
  misc_feature (1)..(1134): Ortholog of  Ceres SEQ ID NO 13503476 as cited in SEQ ID NO 61978
  misc_feature (1)..(1134): Ortholog of  Ceres SEQ ID NO 12578438 as cited in SEQ ID NO 62201
  misc_feature (1)..(1134): Ortholog of  Ceres SEQ ID NO 12617675 as cited in SEQ ID NO 64656

SEQ ID NO: 117061 - protein, 293 aa, Arabidopsis thaliana; identical to SEQ ID NO: 42261
  peptide (1)..(293): Ceres Seq. ID no. 13618099

SEQ ID NO: 117062 - protein, 266 aa, Arabidopsis thaliana; identical to SEQ ID NO: 42262
  peptide (1)..(266): Ceres Seq. ID no. 13618100

SEQ ID NO: 117063 - protein, 213 aa, Arabidopsis thaliana; identical to SEQ ID NO: 42263
  peptide (1)..(213): Ceres Seq. ID no. 13618101

SEQ ID NO: 117064 - DNA, 1334 bp, Arabidopsis thaliana; identical to SEQ ID NO: 105825
  misc_feature (1)..(1334): Ceres Seq. ID no. 13618105
  misc_feature (1)..(1334): Ortholog of  Ceres SEQ ID NO 14307404 as cited in SEQ ID NO 54231
  misc_feature (1)..(1334): Ortholog of  Ceres SEQ ID NO 14315052 as cited in SEQ ID NO 56951

SEQ ID NO: 117065 - protein, 388 aa, Arabidopsis thaliana; identical to SEQ ID NO: 105826
  peptide (1)..(388): Ceres Seq. ID no. 13618106

SEQ ID NO: 117066 - protein, 359 aa, Arabidopsis thaliana; identical to SEQ ID NO: 105827
  peptide (1)..(359): Ceres Seq. ID no. 13618107

SEQ ID NO: 117067 - protein, 338 aa, Arabidopsis thaliana; identical to SEQ ID NO: 105828
  peptide (1)..(338): Ceres Seq. ID no. 13618108

SEQ ID NO: 117068 - DNA, 1783 bp, Arabidopsis thaliana; identical to SEQ ID NO: 105829
  misc_feature (1)..(1783): Ceres Seq. ID no. 13618113
  misc_feature (1)..(1783): Ortholog of  Ceres SEQ ID NO 13597732 as cited in SEQ ID NO 64810
  misc_feature (1)..(1783): Ortholog of  Ceres SEQ ID NO 14301912 as cited in SEQ ID NO 67786

SEQ ID NO: 117069 - protein, 517 aa, Arabidopsis thaliana; identical to SEQ ID NO: 105830
  peptide (1)..(517): Ceres Seq. ID no. 13618114

SEQ ID NO: 117070 - protein, 515 aa, Arabidopsis thaliana; identical to SEQ ID NO: 105831
  peptide (1)..(515): Ceres Seq. ID no. 13618115

SEQ ID NO: 117071 - protein, 513 aa, Arabidopsis thaliana; identical to SEQ ID NO: 105832
  peptide (1)..(513): Ceres Seq. ID no. 13618116

SEQ ID NO: 117072 - DNA, 1139 bp, Arabidopsis thaliana; identical to SEQ ID NO: 105833
  misc_feature (1)..(1139): Ceres Seq. ID no. 13618136
  misc_feature (1)..(1139): Ortholog of  Ceres SEQ ID NO 13596519 as cited in SEQ ID NO 62572
  misc_feature (1)..(1139): Ortholog of  Ceres SEQ ID NO 12625108 as cited in SEQ ID NO 68102

SEQ ID NO: 117073 - protein, 256 aa, Arabidopsis thaliana; identical to SEQ ID NO: 21891
  peptide (1)..(256): Ceres Seq. ID no. 13618137

SEQ ID NO: 117074 - DNA, 956 bp, Arabidopsis thaliana; identical to SEQ ID NO: 105835
  misc_feature (1)..(956): Ceres Seq. ID no. 13618148
  misc_feature (1)..(956): Ortholog of  Ceres SEQ ID NO 12638274 as cited in SEQ ID NO 0
  misc_feature (1)..(956): Ortholog of  Ceres SEQ ID NO 13600563 as cited in SEQ ID NO 0

SEQ ID NO: 117075 - protein, 225 aa, Arabidopsis thaliana; identical to SEQ ID NO: 105836
  peptide (1)..(225): Ceres Seq. ID no. 13618149

SEQ ID NO: 117076 - protein, 194 aa, Arabidopsis thaliana; identical to SEQ ID NO: 105837
  peptide (1)..(194): Ceres Seq. ID no. 13618150

SEQ ID NO: 117077 - protein, 123 aa, Arabidopsis thaliana; identical to SEQ ID NO: 36453
  peptide (1)..(123): Ceres Seq. ID no. 13618151

SEQ ID NO: 117078 - DNA, 1286 bp, Arabidopsis thaliana; identical to SEQ ID NO: 105839
  misc_feature (1)..(1286): Ceres Seq. ID no. 13618156
  misc_feature (1)..(1286): Ortholog of  Ceres SEQ ID NO 13595569 as cited in SEQ ID NO 56778
  misc_feature (1)..(1286): Ortholog of  Ceres SEQ ID NO 12611159 as cited in SEQ ID NO 59821

SEQ ID NO: 117079 - protein, 282 aa, Arabidopsis thaliana; identical to SEQ ID NO: 41372
  peptide (1)..(282): Ceres Seq. ID no. 13618157

SEQ ID NO: 117080 - DNA, 1395 bp, Arabidopsis thaliana; identical to SEQ ID NO: 105841
  misc_feature (1)..(1395): Ceres Seq. ID no. 13618158
  misc_feature (1)..(1395): Ortholog of  Ceres SEQ ID NO 14304120 as cited in SEQ ID NO 58862
  misc_feature (1)..(1395): Ortholog of  Ceres SEQ ID NO 13595658 as cited in SEQ ID NO 59888
  misc_feature (1)..(1395): Ortholog of  Ceres SEQ ID NO 13661330 as cited in SEQ ID NO 61614
  misc_feature (1)..(1395): Ortholog of  Ceres SEQ ID NO 13596025 as cited in SEQ ID NO 62024
  misc_feature (1)..(1395): Ortholog of  Ceres SEQ ID NO 13662324 as cited in SEQ ID NO 62162
  misc_feature (1)..(1395): Ortholog of  Ceres SEQ ID NO 12625713 as cited in SEQ ID NO 64160
  misc_feature (1)..(1395): Ortholog of  Ceres SEQ ID NO 14303564 as cited in SEQ ID NO 65360
  misc_feature (1)..(1395): Ortholog of  Ceres SEQ ID NO 14302860 as cited in SEQ ID NO 67667

SEQ ID NO: 117081 - protein, 345 aa, Arabidopsis thaliana; identical to SEQ ID NO: 21922
  peptide (1)..(345): Ceres Seq. ID no. 13618159

SEQ ID NO: 117082 - protein, 344 aa, Arabidopsis thaliana; identical to SEQ ID NO: 21923
  peptide (1)..(344): Ceres Seq. ID no. 13618160

SEQ ID NO: 117083 - protein, 202 aa, Arabidopsis thaliana; identical to SEQ ID NO: 21924
  peptide (1)..(202): Ceres Seq. ID no. 13618161

SEQ ID NO: 117084 - DNA, 1835 bp, Arabidopsis thaliana; identical to SEQ ID NO: 105845
  misc_feature (1)..(1835): Ceres Seq. ID no. 13618170
  misc_feature (1)..(1835): Ortholog of  Ceres SEQ ID NO 15171476 as cited in SEQ ID NO 55569
  misc_feature (1)..(1835): Ortholog of  Ceres SEQ ID NO 14312069 as cited in SEQ ID NO 59191

SEQ ID NO: 117085 - protein, 524 aa, Arabidopsis thaliana; identical to SEQ ID NO: 43421
  peptide (1)..(524): Ceres Seq. ID no. 13618171

SEQ ID NO: 117086 - protein, 497 aa, Arabidopsis thaliana; identical to SEQ ID NO: 43422
  peptide (1)..(497): Ceres Seq. ID no. 13618172

SEQ ID NO: 117087 - protein, 475 aa, Arabidopsis thaliana; identical to SEQ ID NO: 43423
  peptide (1)..(475): Ceres Seq. ID no. 13618173

SEQ ID NO: 117088 - DNA, 1358 bp, Arabidopsis thaliana; identical to SEQ ID NO: 105849
  misc_feature (1)..(1358): Ceres Seq. ID no. 13618192
  misc_feature (1)..(1358): Ortholog of  Ceres SEQ ID NO 13655375 as cited in SEQ ID NO 63347
  misc_feature (1)..(1358): Ortholog of  Ceres SEQ ID NO 12626166 as cited in SEQ ID NO 64505
  misc_feature (1)..(1358): Ortholog of  Ceres SEQ ID NO 13654415 as cited in SEQ ID NO 68820
  misc_feature (1)..(1358): Ortholog of  Ceres SEQ ID NO 14303290 as cited in SEQ ID NO 0

SEQ ID NO: 117089 - protein, 337 aa, Arabidopsis thaliana; identical to SEQ ID NO: 22961
  peptide (1)..(337): Ceres Seq. ID no. 13618193

SEQ ID NO: 117090 - protein, 333 aa, Arabidopsis thaliana; identical to SEQ ID NO: 22962
  peptide (1)..(333): Ceres Seq. ID no. 13618194

SEQ ID NO: 117091 - protein, 297 aa, Arabidopsis thaliana; identical to SEQ ID NO: 22963
  peptide (1)..(297): Ceres Seq. ID no. 13618195

SEQ ID NO: 117092 - DNA, 1943 bp, Arabidopsis thaliana; identical to SEQ ID NO: 105853
  misc_feature (1)..(1943): Ceres Seq. ID no. 13618204
  misc_feature (1)..(1943): Ortholog of  Ceres SEQ ID NO 12623695 as cited in SEQ ID NO 61286

SEQ ID NO: 117093 - protein, 558 aa, Arabidopsis thaliana; identical to SEQ ID NO: 105854
  peptide (1)..(558): Ceres Seq. ID no. 13618205

SEQ ID NO: 117094 - protein, 536 aa, Arabidopsis thaliana; identical to SEQ ID NO: 105855
  peptide (1)..(536): Ceres Seq. ID no. 13618206

SEQ ID NO: 117095 - protein, 508 aa, Arabidopsis thaliana; identical to SEQ ID NO: 105856
  peptide (1)..(508): Ceres Seq. ID no. 13618207

SEQ ID NO: 117096 - DNA, 1304 bp, Arabidopsis thaliana; identical to SEQ ID NO: 105857
  misc_feature (1)..(1304): Ceres Seq. ID no. 13618208
  misc_feature (1)..(1304): Ortholog of  Ceres SEQ ID NO 15169191 as cited in SEQ ID NO 58440
  misc_feature (1)..(1304): Ortholog of  Ceres SEQ ID NO 13597523 as cited in SEQ ID NO 64778

SEQ ID NO: 117097 - protein, 287 aa, Arabidopsis thaliana; identical to SEQ ID NO: 23979
  peptide (1)..(287): Ceres Seq. ID no. 13618209

SEQ ID NO: 117098 - protein, 212 aa, Arabidopsis thaliana; identical to SEQ ID NO: 23980
  peptide (1)..(212): Ceres Seq. ID no. 13618210

SEQ ID NO: 117099 - protein, 166 aa, Arabidopsis thaliana; identical to SEQ ID NO: 23981
  peptide (1)..(166): Ceres Seq. ID no. 13618211

SEQ ID NO: 117100 - DNA, 813 bp, Arabidopsis thaliana; identical to SEQ ID NO: 105861
  misc_feature (1)..(813): Ceres Seq. ID no. 13618212
  misc_feature (1)..(813): Ortholog of  Ceres SEQ ID NO 13639250 as cited in SEQ ID NO 56555
  misc_feature (1)..(813): Ortholog of  Ceres SEQ ID NO 15177034 as cited in SEQ ID NO 60024
  misc_feature (1)..(813): Ortholog of  Ceres SEQ ID NO 13598257 as cited in SEQ ID NO 63008
  misc_feature (1)..(813): Ortholog of  Ceres SEQ ID NO 13597309 as cited in SEQ ID NO 63851
  misc_feature (1)..(813): Ortholog of  Ceres SEQ ID NO 12599167 as cited in SEQ ID NO 64443

SEQ ID NO: 117101 - protein, 233 aa, Arabidopsis thaliana; identical to SEQ ID NO: 105862
  peptide (1)..(233): Ceres Seq. ID no. 13618213

SEQ ID NO: 117102 - protein, 220 aa, Arabidopsis thaliana; identical to SEQ ID NO: 105863
  peptide (1)..(220): Ceres Seq. ID no. 13618214

SEQ ID NO: 117103 - protein, 211 aa, Arabidopsis thaliana; identical to SEQ ID NO: 81818
  peptide (1)..(211): Ceres Seq. ID no. 13618215

SEQ ID NO: 117104 - DNA, 1376 bp, Arabidopsis thaliana; identical to SEQ ID NO: 105865
  misc_feature (1)..(1376): Ceres Seq. ID no. 13618216
  misc_feature (1)..(1376): Ortholog of  Ceres SEQ ID NO 13655992 as cited in SEQ ID NO 65504
  misc_feature (1)..(1376): Ortholog of  Ceres SEQ ID NO 13587581 as cited in SEQ ID NO 0

SEQ ID NO: 117105 - protein, 346 aa, Arabidopsis thaliana; identical to SEQ ID NO: 74472
  peptide (1)..(346): Ceres Seq. ID no. 13618217

SEQ ID NO: 117106 - protein, 304 aa, Arabidopsis thaliana; identical to SEQ ID NO: 42058
  peptide (1)..(304): Ceres Seq. ID no. 13618218

SEQ ID NO: 117107 - protein, 300 aa, Arabidopsis thaliana; identical to SEQ ID NO: 42059
  peptide (1)..(300): Ceres Seq. ID no. 13618219

SEQ ID NO: 117108 - DNA, 1229 bp, Arabidopsis thaliana; identical to SEQ ID NO: 105869
  misc_feature (1)..(1229): Ceres Seq. ID no. 13618228
  misc_feature (1)..(1229): Ortholog of  Ceres SEQ ID NO 14304170 as cited in SEQ ID NO 53453
  misc_feature (1)..(1229): Ortholog of  Ceres SEQ ID NO 14315911 as cited in SEQ ID NO 56998
  misc_feature (1)..(1229): Ortholog of  Ceres SEQ ID NO 13656028 as cited in SEQ ID NO 64728

SEQ ID NO: 117109 - protein, 333 aa, Arabidopsis thaliana; identical to SEQ ID NO: 105870
  peptide (1)..(333): Ceres Seq. ID no. 13618229

SEQ ID NO: 117110 - protein, 313 aa, Arabidopsis thaliana; identical to SEQ ID NO: 105871
  peptide (1)..(313): Ceres Seq. ID no. 13618230

SEQ ID NO: 117111 - protein, 185 aa, Arabidopsis thaliana; identical to SEQ ID NO: 105872
  peptide (1)..(185): Ceres Seq. ID no. 13618231

SEQ ID NO: 117112 - DNA, 1518 bp, Arabidopsis thaliana; identical to SEQ ID NO: 105873
  misc_feature (1)..(1518): Ceres Seq. ID no. 13618232
  misc_feature (1)..(1518): Ortholog of  Ceres SEQ ID NO 15177368 as cited in SEQ ID NO 57336

SEQ ID NO: 117113 - protein, 380 aa, Arabidopsis thaliana; identical to SEQ ID NO: 27590
  peptide (1)..(380): Ceres Seq. ID no. 13618233

SEQ ID NO: 117114 - protein, 318 aa, Arabidopsis thaliana; identical to SEQ ID NO: 27591
  peptide (1)..(318): Ceres Seq. ID no. 13618234

SEQ ID NO: 117115 - DNA, 1308 bp, Arabidopsis thaliana; identical to SEQ ID NO: 105876
  misc_feature (1)..(1308): Ceres Seq. ID no. 13618235
  misc_feature (1)..(1308): Ortholog of  Ceres SEQ ID NO 13638292 as cited in SEQ ID NO 57738

SEQ ID NO: 117116 - protein, 350 aa, Arabidopsis thaliana; identical to SEQ ID NO: 27633
  peptide (1)..(350): Ceres Seq. ID no. 13618236

SEQ ID NO: 117117 - protein, 278 aa, Arabidopsis thaliana; identical to SEQ ID NO: 27634
  peptide (1)..(278): Ceres Seq. ID no. 13618237

SEQ ID NO: 117118 - protein, 241 aa, Arabidopsis thaliana; identical to SEQ ID NO: 27635
  peptide (1)..(241): Ceres Seq. ID no. 13618238

SEQ ID NO: 117119 - DNA, 1009 bp, Arabidopsis thaliana; identical to SEQ ID NO: 105880
  misc_feature (1)..(1009): Ceres Seq. ID no. 13618239
  misc_feature (1)..(1009): Ortholog of  Ceres SEQ ID NO 12377905 as cited in SEQ ID NO 1260

SEQ ID NO: 117120 - protein, 266 aa, Arabidopsis thaliana; identical to SEQ ID NO: 37643
  peptide (1)..(266): Ceres Seq. ID no. 13618240

SEQ ID NO: 117121 - protein, 262 aa, Arabidopsis thaliana; identical to SEQ ID NO: 37644
  peptide (1)..(262): Ceres Seq. ID no. 13618241

SEQ ID NO: 117122 - protein, 216 aa, Arabidopsis thaliana; identical to SEQ ID NO: 37645
  peptide (1)..(216): Ceres Seq. ID no. 13618242

SEQ ID NO: 117123 - DNA, 1032 bp, Arabidopsis thaliana; identical to SEQ ID NO: 105884
  misc_feature (1)..(1032): Ceres Seq. ID no. 13618266
  misc_feature (1)..(1032): Ortholog of  Ceres SEQ ID NO 12557497 as cited in SEQ ID NO 43

SEQ ID NO: 117124 - protein, 280 aa, Arabidopsis thaliana; identical to SEQ ID NO: 25086
  peptide (1)..(280): Ceres Seq. ID no. 13618267

SEQ ID NO: 117125 - protein, 272 aa, Arabidopsis thaliana; identical to SEQ ID NO: 25087
  peptide (1)..(272): Ceres Seq. ID no. 13618268

SEQ ID NO: 117126 - protein, 159 aa, Arabidopsis thaliana; identical to SEQ ID NO: 25088
  peptide (1)..(159): Ceres Seq. ID no. 13618269

SEQ ID NO: 117127 - DNA, 1763 bp, Arabidopsis thaliana; identical to SEQ ID NO: 105888
  misc_feature (1)..(1763): Ceres Seq. ID no. 13618270
  misc_feature (1)..(1763): Ortholog of  Ceres SEQ ID NO 13594193 as cited in SEQ ID NO 58558

SEQ ID NO: 117128 - protein, 304 aa, Arabidopsis thaliana; identical to SEQ ID NO: 23583
  peptide (1)..(304): Ceres Seq. ID no. 13618271

SEQ ID NO: 117129 - protein, 293 aa, Arabidopsis thaliana; identical to SEQ ID NO: 23584
  peptide (1)..(293): Ceres Seq. ID no. 13618272

SEQ ID NO: 117130 - protein, 291 aa, Arabidopsis thaliana; identical to SEQ ID NO: 23585
  peptide (1)..(291): Ceres Seq. ID no. 13618273

SEQ ID NO: 117131 - DNA, 634 bp, Arabidopsis thaliana; identical to SEQ ID NO: 105892
  misc_feature (1)..(634): Ceres Seq. ID no. 13618282
  misc_feature (1)..(634): Ortholog of  Ceres SEQ ID NO 12584812 as cited in SEQ ID NO 62672

SEQ ID NO: 117132 - protein, 126 aa, Arabidopsis thaliana; identical to SEQ ID NO: 43068
  peptide (1)..(126): Ceres Seq. ID no. 13618283

SEQ ID NO: 117133 - protein, 123 aa, Arabidopsis thaliana; identical to SEQ ID NO: 43069
  peptide (1)..(123): Ceres Seq. ID no. 13618284

SEQ ID NO: 117134 - protein, 111 aa, Arabidopsis thaliana; identical to SEQ ID NO: 43070
  peptide (1)..(111): Ceres Seq. ID no. 13618285

SEQ ID NO: 117135 - DNA, 1883 bp, Arabidopsis thaliana; identical to SEQ ID NO: 105896
  misc_feature (1)..(1883): Ceres Seq. ID no. 13618286
  misc_feature (1)..(1883): Ortholog of  Ceres SEQ ID NO 15170811 as cited in SEQ ID NO 52649
  misc_feature (1)..(1883): Ortholog of  Ceres SEQ ID NO 13638331 as cited in SEQ ID NO 58047
  misc_feature (1)..(1883): Ortholog of  Ceres SEQ ID NO 15225845 as cited in SEQ ID NO 65125
  misc_feature (1)..(1883): Ortholog of  Ceres SEQ ID NO 15170135 as cited in SEQ ID NO 67647

SEQ ID NO: 117136 - protein, 548 aa, Arabidopsis thaliana; identical to SEQ ID NO: 105897
  peptide (1)..(548): Ceres Seq. ID no. 13618287

SEQ ID NO: 117137 - protein, 528 aa, Arabidopsis thaliana; identical to SEQ ID NO: 40529
  peptide (1)..(528): Ceres Seq. ID no. 13618288

SEQ ID NO: 117138 - protein, 495 aa, Arabidopsis thaliana; identical to SEQ ID NO: 40530
  peptide (1)..(495): Ceres Seq. ID no. 13618289

SEQ ID NO: 117139 - DNA, 1540 bp, Arabidopsis thaliana; identical to SEQ ID NO: 105900
  misc_feature (1)..(1540): Ceres Seq. ID no. 13618290
  misc_feature (1)..(1540): Ortholog of  Ceres SEQ ID NO 14303770 as cited in SEQ ID NO 53890

SEQ ID NO: 117140 - protein, 401 aa, Arabidopsis thaliana; identical to SEQ ID NO: 24557
  peptide (1)..(401): Ceres Seq. ID no. 13618291

SEQ ID NO: 117141 - protein, 349 aa, Arabidopsis thaliana; identical to SEQ ID NO: 24558
  peptide (1)..(349): Ceres Seq. ID no. 13618292

SEQ ID NO: 117142 - protein, 308 aa, Arabidopsis thaliana; identical to SEQ ID NO: 40269
  peptide (1)..(308): Ceres Seq. ID no. 13618293

SEQ ID NO: 117143 - DNA, 1135 bp, Arabidopsis thaliana; identical to SEQ ID NO: 105904
  misc_feature (1)..(1135): Ceres Seq. ID no. 13618294
  misc_feature (1)..(1135): Ortholog of  Ceres SEQ ID NO 14309591 as cited in SEQ ID NO 52617
  misc_feature (1)..(1135): Ortholog of  Ceres SEQ ID NO 13597418 as cited in SEQ ID NO 63764

SEQ ID NO: 117144 - protein, 233 aa, Arabidopsis thaliana; identical to SEQ ID NO: 35486
  peptide (1)..(233): Ceres Seq. ID no. 13618295

SEQ ID NO: 117145 - protein, 225 aa, Arabidopsis thaliana; identical to SEQ ID NO: 35487
  peptide (1)..(225): Ceres Seq. ID no. 13618296

SEQ ID NO: 117146 - protein, 209 aa, Arabidopsis thaliana; identical to SEQ ID NO: 35488
  peptide (1)..(209): Ceres Seq. ID no. 13618297

SEQ ID NO: 117147 - DNA, 3145 bp, Arabidopsis thaliana; identical to SEQ ID NO: 105908
  misc_feature (1)..(3145): Ceres Seq. ID no. 13618312
  misc_feature (1)..(3145): Ortholog of  Ceres SEQ ID NO 14306557 as cited in SEQ ID NO 53442

SEQ ID NO: 117148 - protein, 920 aa, Arabidopsis thaliana; identical to SEQ ID NO: 105909
  peptide (1)..(920): Ceres Seq. ID no. 13618313

SEQ ID NO: 117149 - protein, 872 aa, Arabidopsis thaliana; identical to SEQ ID NO: 105910
  peptide (1)..(872): Ceres Seq. ID no. 13618314

SEQ ID NO: 117150 - protein, 842 aa, Arabidopsis thaliana; identical to SEQ ID NO: 105911
  peptide (1)..(842): Ceres Seq. ID no. 13618315

SEQ ID NO: 117151 - DNA, 1166 bp, Arabidopsis thaliana; identical to SEQ ID NO: 105912
  misc_feature (1)..(1166): Ceres Seq. ID no. 13618316
  misc_feature (1)..(1166): Ortholog of  Ceres SEQ ID NO 14315013 as cited in SEQ ID NO 57760
  misc_feature (1)..(1166): Ortholog of  Ceres SEQ ID NO 13598248 as cited in SEQ ID NO 64224

SEQ ID NO: 117152 - protein, 248 aa, Arabidopsis thaliana; identical to SEQ ID NO: 23147
  peptide (1)..(248): Ceres Seq. ID no. 13618317

SEQ ID NO: 117153 - protein, 175 aa, Arabidopsis thaliana; identical to SEQ ID NO: 23148
  peptide (1)..(175): Ceres Seq. ID no. 13618318

SEQ ID NO: 117154 - DNA, 802 bp, Arabidopsis thaliana; identical to SEQ ID NO: 105915
  misc_feature (1)..(802): Ceres Seq. ID no. 13618319
  misc_feature (1)..(802): Ortholog of  Ceres SEQ ID NO 13595495 as cited in SEQ ID NO 56624
  misc_feature (1)..(802): Ortholog of  Ceres SEQ ID NO 12608406 as cited in SEQ ID NO 58017
  misc_feature (1)..(802): Ortholog of  Ceres SEQ ID NO 13599397 as cited in SEQ ID NO 0

SEQ ID NO: 117155 - protein, 199 aa, Arabidopsis thaliana; identical to SEQ ID NO: 105916
  peptide (1)..(199): Ceres Seq. ID no. 13618320

SEQ ID NO: 117156 - protein, 167 aa, Arabidopsis thaliana; identical to SEQ ID NO: 35082
  peptide (1)..(167): Ceres Seq. ID no. 13618321

SEQ ID NO: 117157 - DNA, 1280 bp, Arabidopsis thaliana; identical to SEQ ID NO: 105918
  misc_feature (1)..(1280): Ceres Seq. ID no. 13618330
  misc_feature (1)..(1280): Ortholog of  Ceres SEQ ID NO 15174863 as cited in SEQ ID NO 51281
  misc_feature (1)..(1280): Ortholog of  Ceres SEQ ID NO 12614972 as cited in SEQ ID NO 61986
  misc_feature (1)..(1280): Ortholog of  Ceres SEQ ID NO 14302317 as cited in SEQ ID NO 63244
  misc_feature (1)..(1280): Ortholog of  Ceres SEQ ID NO 12625706 as cited in SEQ ID NO 64144
  misc_feature (1)..(1280): Ortholog of  Ceres SEQ ID NO 13584933 as cited in SEQ ID NO 65009
  misc_feature (1)..(1280): Ortholog of  Ceres SEQ ID NO 12634984 as cited in SEQ ID NO 0
  misc_feature (1)..(1280): Ortholog of  Ceres SEQ ID NO 13599377 as cited in SEQ ID NO 0

SEQ ID NO: 117158 - protein, 350 aa, Arabidopsis thaliana; identical to SEQ ID NO: 25619
  peptide (1)..(350): Ceres Seq. ID no. 13618331

SEQ ID NO: 117159 - protein, 179 aa, Arabidopsis thaliana; identical to SEQ ID NO: 25620
  peptide (1)..(179): Ceres Seq. ID no. 13618332

SEQ ID NO: 117160 - DNA, 1346 bp, Arabidopsis thaliana; identical to SEQ ID NO: 105921
  misc_feature (1)..(1346): Ceres Seq. ID no. 13618333
  misc_feature (1)..(1346): Ortholog of  Ceres SEQ ID NO 15174863 as cited in SEQ ID NO 51281
  misc_feature (1)..(1346): Ortholog of  Ceres SEQ ID NO 12614972 as cited in SEQ ID NO 61986
  misc_feature (1)..(1346): Ortholog of  Ceres SEQ ID NO 14302317 as cited in SEQ ID NO 63244
  misc_feature (1)..(1346): Ortholog of  Ceres SEQ ID NO 12625706 as cited in SEQ ID NO 64144
  misc_feature (1)..(1346): Ortholog of  Ceres SEQ ID NO 13584933 as cited in SEQ ID NO 65009
  misc_feature (1)..(1346): Ortholog of  Ceres SEQ ID NO 12634984 as cited in SEQ ID NO 0
  misc_feature (1)..(1346): Ortholog of  Ceres SEQ ID NO 13599377 as cited in SEQ ID NO 0

SEQ ID NO: 117161 - protein, 338 aa, Arabidopsis thaliana; identical to SEQ ID NO: 23272
  peptide (1)..(338): Ceres Seq. ID no. 13618334

SEQ ID NO: 117162 - protein, 179 aa, Arabidopsis thaliana; identical to SEQ ID NO: 23273
  peptide (1)..(179): Ceres Seq. ID no. 13618335

SEQ ID NO: 117163 - DNA, 1352 bp, Arabidopsis thaliana; identical to SEQ ID NO: 105924
  misc_feature (1)..(1352): Ceres Seq. ID no. 13618340
  misc_feature (1)..(1352): Ortholog of  Ceres SEQ ID NO 15225493 as cited in SEQ ID NO 65438
  misc_feature (1)..(1352): Ortholog of  Ceres SEQ ID NO 14313344 as cited in SEQ ID NO 69148

SEQ ID NO: 117164 - protein, 418 aa, Arabidopsis thaliana; identical to SEQ ID NO: 35618
  peptide (1)..(418): Ceres Seq. ID no. 13618341

SEQ ID NO: 117165 - protein, 392 aa, Arabidopsis thaliana; identical to SEQ ID NO: 35619
  peptide (1)..(392): Ceres Seq. ID no. 13618342

SEQ ID NO: 117166 - protein, 240 aa, Arabidopsis thaliana; identical to SEQ ID NO: 35620
  peptide (1)..(240): Ceres Seq. ID no. 13618343

SEQ ID NO: 117167 - DNA, 1313 bp, Arabidopsis thaliana; identical to SEQ ID NO: 105928
  misc_feature (1)..(1313): Ceres Seq. ID no. 13618344
  misc_feature (1)..(1313): Ortholog of  Ceres SEQ ID NO 14308615 as cited in SEQ ID NO 58538
  misc_feature (1)..(1313): Ortholog of  Ceres SEQ ID NO 13585342 as cited in SEQ ID NO 63601

SEQ ID NO: 117168 - protein, 372 aa, Arabidopsis thaliana; identical to SEQ ID NO: 41280
  peptide (1)..(372): Ceres Seq. ID no. 13618345

SEQ ID NO: 117169 - protein, 256 aa, Arabidopsis thaliana; identical to SEQ ID NO: 41281
  peptide (1)..(256): Ceres Seq. ID no. 13618346

SEQ ID NO: 117170 - protein, 210 aa, Arabidopsis thaliana; identical to SEQ ID NO: 41282
  peptide (1)..(210): Ceres Seq. ID no. 13618347

SEQ ID NO: 117171 - DNA, 1222 bp, Arabidopsis thaliana; identical to SEQ ID NO: 105932
  misc_feature (1)..(1222): Ceres Seq. ID no. 13618348
  misc_feature (1)..(1222): Ortholog of  Ceres SEQ ID NO 14308615 as cited in SEQ ID NO 58538
  misc_feature (1)..(1222): Ortholog of  Ceres SEQ ID NO 13585342 as cited in SEQ ID NO 63601
  misc_feature (1)..(1222): Ortholog of  Ceres SEQ ID NO 15177459 as cited in SEQ ID NO 0

SEQ ID NO: 117172 - protein, 369 aa, Arabidopsis thaliana; identical to SEQ ID NO: 105933
  peptide (1)..(369): Ceres Seq. ID no. 13618349

SEQ ID NO: 117173 - protein, 346 aa, Arabidopsis thaliana; identical to SEQ ID NO: 105934
  peptide (1)..(346): Ceres Seq. ID no. 13618350

SEQ ID NO: 117174 - protein, 247 aa, Arabidopsis thaliana; identical to SEQ ID NO: 21676
  peptide (1)..(247): Ceres Seq. ID no. 13618351

SEQ ID NO: 117175 - DNA, 1062 bp, Arabidopsis thaliana; identical to SEQ ID NO: 105936
  misc_feature (1)..(1062): Ceres Seq. ID no. 13618352
  misc_feature (1)..(1062): Ortholog of  Ceres SEQ ID NO 12784064 as cited in SEQ ID NO 66982
  misc_feature (1)..(1062): Ortholog of  Ceres SEQ ID NO 15177907 as cited in SEQ ID NO 0

SEQ ID NO: 117176 - protein, 223 aa, Arabidopsis thaliana; identical to SEQ ID NO: 22725
  peptide (1)..(223): Ceres Seq. ID no. 13618353

SEQ ID NO: 117177 - protein, 184 aa, Arabidopsis thaliana; identical to SEQ ID NO: 22726
  peptide (1)..(184): Ceres Seq. ID no. 13618354

SEQ ID NO: 117178 - protein, 124 aa, Arabidopsis thaliana; identical to SEQ ID NO: 22727
  peptide (1)..(124): Ceres Seq. ID no. 13618355

SEQ ID NO: 117179 - DNA, 1313 bp, Arabidopsis thaliana; identical to SEQ ID NO: 105940
  misc_feature (1)..(1313): Ceres Seq. ID no. 13618356
  misc_feature (1)..(1313): Ortholog of  Ceres SEQ ID NO 12364737 as cited in SEQ ID NO 51089
  misc_feature (1)..(1313): Ortholog of  Ceres SEQ ID NO 13595567 as cited in SEQ ID NO 56760
  misc_feature (1)..(1313): Ortholog of  Ceres SEQ ID NO 13655302 as cited in SEQ ID NO 63307
  misc_feature (1)..(1313): Ortholog of  Ceres SEQ ID NO 13597380 as cited in SEQ ID NO 64054
  misc_feature (1)..(1313): Ortholog of  Ceres SEQ ID NO 12625474 as cited in SEQ ID NO 64169
  misc_feature (1)..(1313): Ortholog of  Ceres SEQ ID NO 13597502 as cited in SEQ ID NO 64681

SEQ ID NO: 117180 - protein, 373 aa, Arabidopsis thaliana; identical to SEQ ID NO: 105941
  peptide (1)..(373): Ceres Seq. ID no. 13618357

SEQ ID NO: 117181 - protein, 366 aa, Arabidopsis thaliana; identical to SEQ ID NO: 21452
  peptide (1)..(366): Ceres Seq. ID no. 13618358

SEQ ID NO: 117182 - protein, 275 aa, Arabidopsis thaliana; identical to SEQ ID NO: 21453
  peptide (1)..(275): Ceres Seq. ID no. 13618359

SEQ ID NO: 117183 - DNA, 1741 bp, Arabidopsis thaliana; identical to SEQ ID NO: 105944
  misc_feature (1)..(1741): Ceres Seq. ID no. 13618364
  misc_feature (1)..(1741): Ortholog of  Ceres SEQ ID NO 13594209 as cited in SEQ ID NO 59089
  misc_feature (1)..(1741): Ortholog of  Ceres SEQ ID NO 13664173 as cited in SEQ ID NO 61223
  misc_feature (1)..(1741): Ortholog of  Ceres SEQ ID NO 13502874 as cited in SEQ ID NO 66298
  misc_feature (1)..(1741): Ortholog of  Ceres SEQ ID NO 12614124 as cited in SEQ ID NO 68392

SEQ ID NO: 117184 - protein, 497 aa, Arabidopsis thaliana; identical to SEQ ID NO: 105945
  peptide (1)..(497): Ceres Seq. ID no. 13618365

SEQ ID NO: 117185 - protein, 481 aa, Arabidopsis thaliana; identical to SEQ ID NO: 105946
  peptide (1)..(481): Ceres Seq. ID no. 13618366

SEQ ID NO: 117186 - protein, 455 aa, Arabidopsis thaliana; identical to SEQ ID NO: 105947
  peptide (1)..(455): Ceres Seq. ID no. 13618367

SEQ ID NO: 117187 - DNA, 1805 bp, Arabidopsis thaliana; identical to SEQ ID NO: 105948
  misc_feature (1)..(1805): Ceres Seq. ID no. 13618387
  misc_feature (1)..(1805): Ortholog of  Ceres SEQ ID NO 13589042 as cited in SEQ ID NO 60626
  misc_feature (1)..(1805): Ortholog of  Ceres SEQ ID NO 14302887 as cited in SEQ ID NO 66146

SEQ ID NO: 117188 - protein, 415 aa, Arabidopsis thaliana; identical to SEQ ID NO: 38942
  peptide (1)..(415): Ceres Seq. ID no. 13618388

SEQ ID NO: 117189 - protein, 411 aa, Arabidopsis thaliana; identical to SEQ ID NO: 38943
  peptide (1)..(411): Ceres Seq. ID no. 13618389

SEQ ID NO: 117190 - protein, 402 aa, Arabidopsis thaliana; identical to SEQ ID NO: 38944
  peptide (1)..(402): Ceres Seq. ID no. 13618390

SEQ ID NO: 117191 - DNA, 917 bp, Arabidopsis thaliana; identical to SEQ ID NO: 105952
  misc_feature (1)..(917): Ceres Seq. ID no. 13618391
  misc_feature (1)..(917): Ortholog of  Ceres SEQ ID NO 15170337 as cited in SEQ ID NO 57970

SEQ ID NO: 117192 - protein, 230 aa, Arabidopsis thaliana; identical to SEQ ID NO: 105953
  peptide (1)..(230): Ceres Seq. ID no. 13618392

SEQ ID NO: 117193 - protein, 195 aa, Arabidopsis thaliana; identical to SEQ ID NO: 105954
  peptide (1)..(195): Ceres Seq. ID no. 13618393

SEQ ID NO: 117194 - protein, 190 aa, Arabidopsis thaliana; identical to SEQ ID NO: 105955
  peptide (1)..(190): Ceres Seq. ID no. 13618394

SEQ ID NO: 117195 - DNA, 608 bp, Arabidopsis thaliana; identical to SEQ ID NO: 105956
  misc_feature (1)..(608): Ceres Seq. ID no. 13618399
  misc_feature (1)..(608): Ortholog of  Ceres SEQ ID NO 15178847 as cited in SEQ ID NO 1145
  misc_feature (1)..(608): Ortholog of  Ceres SEQ ID NO 14311253 as cited in SEQ ID NO 56483
  misc_feature (1)..(608): Ortholog of  Ceres SEQ ID NO 13597435 as cited in SEQ ID NO 64073
  misc_feature (1)..(608): Ortholog of  Ceres SEQ ID NO 13656209 as cited in SEQ ID NO 64393

SEQ ID NO: 117196 - protein, 161 aa, Arabidopsis thaliana; identical to SEQ ID NO: 105957
  peptide (1)..(161): Ceres Seq. ID no. 13618400

SEQ ID NO: 117197 - protein, 137 aa, Arabidopsis thaliana; identical to SEQ ID NO: 38333
  peptide (1)..(137): Ceres Seq. ID no. 13618401

SEQ ID NO: 117198 - DNA, 941 bp, Arabidopsis thaliana; identical to SEQ ID NO: 105959
  misc_feature (1)..(941): Ceres Seq. ID no. 13618402
  misc_feature (1)..(941): Ortholog of  Ceres SEQ ID NO 14307351 as cited in SEQ ID NO 54892

SEQ ID NO: 117199 - protein, 312 aa, Arabidopsis thaliana; identical to SEQ ID NO: 105960
  peptide (1)..(312): Ceres Seq. ID no. 13618403

SEQ ID NO: 117200 - protein, 241 aa, Arabidopsis thaliana; identical to SEQ ID NO: 105961
  peptide (1)..(241): Ceres Seq. ID no. 13618404

SEQ ID NO: 117201 - DNA, 1520 bp, Arabidopsis thaliana; identical to SEQ ID NO: 105962
  misc_feature (1)..(1520): Ceres Seq. ID no. 13618405
  misc_feature (1)..(1520): Ortholog of  Ceres SEQ ID NO 15171297 as cited in SEQ ID NO 51458

SEQ ID NO: 117202 - protein, 336 aa, Arabidopsis thaliana; identical to SEQ ID NO: 105963
  peptide (1)..(336): Ceres Seq. ID no. 13618406

SEQ ID NO: 117203 - protein, 189 aa, Arabidopsis thaliana; identical to SEQ ID NO: 105964
  peptide (1)..(189): Ceres Seq. ID no. 13618407

SEQ ID NO: 117204 - DNA, 1640 bp, Arabidopsis thaliana; identical to SEQ ID NO: 105965
  misc_feature (1)..(1640): Ceres Seq. ID no. 13618427
  misc_feature (1)..(1640): Ortholog of  Ceres SEQ ID NO 13582281 as cited in SEQ ID NO 51014
  misc_feature (1)..(1640): Ortholog of  Ceres SEQ ID NO 15176795 as cited in SEQ ID NO 54453
  misc_feature (1)..(1640): Ortholog of  Ceres SEQ ID NO 14310508 as cited in SEQ ID NO 58965
  misc_feature (1)..(1640): Ortholog of  Ceres SEQ ID NO 12617417 as cited in SEQ ID NO 65089

SEQ ID NO: 117205 - protein, 472 aa, Arabidopsis thaliana; identical to SEQ ID NO: 105966
  peptide (1)..(472): Ceres Seq. ID no. 13618428

SEQ ID NO: 117206 - protein, 455 aa, Arabidopsis thaliana; identical to SEQ ID NO: 25045
  peptide (1)..(455): Ceres Seq. ID no. 13618429

SEQ ID NO: 117207 - protein, 446 aa, Arabidopsis thaliana; identical to SEQ ID NO: 25046
  peptide (1)..(446): Ceres Seq. ID no. 13618430

SEQ ID NO: 117208 - DNA, 1090 bp, Arabidopsis thaliana; identical to SEQ ID NO: 105969
  misc_feature (1)..(1090): Ceres Seq. ID no. 13618451
  misc_feature (1)..(1090): Ortholog of  Ceres SEQ ID NO 15225507 as cited in SEQ ID NO 55551
  misc_feature (1)..(1090): Ortholog of  Ceres SEQ ID NO 15225677 as cited in SEQ ID NO 0

SEQ ID NO: 117209 - protein, 299 aa, Arabidopsis thaliana; identical to SEQ ID NO: 105970
  peptide (1)..(299): Ceres Seq. ID no. 13618452

SEQ ID NO: 117210 - protein, 264 aa, Arabidopsis thaliana; identical to SEQ ID NO: 38461
  peptide (1)..(264): Ceres Seq. ID no. 13618453

SEQ ID NO: 117211 - protein, 257 aa, Arabidopsis thaliana; identical to SEQ ID NO: 38462
  peptide (1)..(257): Ceres Seq. ID no. 13618454

SEQ ID NO: 117212 - DNA, 781 bp, Arabidopsis thaliana; identical to SEQ ID NO: 105973
  misc_feature (1)..(781): Ceres Seq. ID no. 13618459
  misc_feature (1)..(781): Ortholog of  Ceres SEQ ID NO 14306299 as cited in SEQ ID NO 56895
  misc_feature (1)..(781): Ortholog of  Ceres SEQ ID NO 13663631 as cited in SEQ ID NO 67073

SEQ ID NO: 117213 - protein, 163 aa, Arabidopsis thaliana; identical to SEQ ID NO: 27203
  peptide (1)..(163): Ceres Seq. ID no. 13618460

SEQ ID NO: 117214 - protein, 92 aa, Arabidopsis thaliana; identical to SEQ ID NO: 27204
  peptide (1)..(92): Ceres Seq. ID no. 13618461

SEQ ID NO: 117215 - DNA, 1974 bp, Arabidopsis thaliana; identical to SEQ ID NO: 105976
  misc_feature (1)..(1974): Ceres Seq. ID no. 13618486
  misc_feature (1)..(1974): Ortholog of  Ceres SEQ ID NO 14302935 as cited in SEQ ID NO 20442

SEQ ID NO: 117216 - protein, 550 aa, Arabidopsis thaliana; identical to SEQ ID NO: 105977
  peptide (1)..(550): Ceres Seq. ID no. 13618487

SEQ ID NO: 117217 - protein, 444 aa, Arabidopsis thaliana; identical to SEQ ID NO: 42150
  peptide (1)..(444): Ceres Seq. ID no. 13618488

SEQ ID NO: 117218 - protein, 408 aa, Arabidopsis thaliana; identical to SEQ ID NO: 42151
  peptide (1)..(408): Ceres Seq. ID no. 13618489

SEQ ID NO: 117219 - DNA, 900 bp, Arabidopsis thaliana; identical to SEQ ID NO: 105980
  misc_feature (1)..(900): Ceres Seq. ID no. 13618490
  misc_feature (1)..(900): Ortholog of  Ceres SEQ ID NO 15169972 as cited in SEQ ID NO 51692

SEQ ID NO: 117220 - protein, 291 aa, Arabidopsis thaliana; identical to SEQ ID NO: 97876
  peptide (1)..(291): Ceres Seq. ID no. 13618491

SEQ ID NO: 117221 - protein, 232 aa, Arabidopsis thaliana; identical to SEQ ID NO: 97877
  peptide (1)..(232): Ceres Seq. ID no. 13618492

SEQ ID NO: 117222 - DNA, 748 bp, Arabidopsis thaliana; identical to SEQ ID NO: 105983
  misc_feature (1)..(748): Ceres Seq. ID no. 13618493
  misc_feature (1)..(748): Ortholog of  Ceres SEQ ID NO 15227036 as cited in SEQ ID NO 61662
  misc_feature (1)..(748): Ortholog of  Ceres SEQ ID NO 12635268 as cited in SEQ ID NO 0

SEQ ID NO: 117223 - protein, 161 aa, Arabidopsis thaliana; identical to SEQ ID NO: 30485
  peptide (1)..(161): Ceres Seq. ID no. 13618494

SEQ ID NO: 117224 - protein, 144 aa, Arabidopsis thaliana; identical to SEQ ID NO: 30486
  peptide (1)..(144): Ceres Seq. ID no. 13618495

SEQ ID NO: 117225 - protein, 121 aa, Arabidopsis thaliana; identical to SEQ ID NO: 30487
  peptide (1)..(121): Ceres Seq. ID no. 13618496

SEQ ID NO: 117226 - DNA, 1369 bp, Arabidopsis thaliana; identical to SEQ ID NO: 105987
  misc_feature (1)..(1369): Ceres Seq. ID no. 13618505
  misc_feature (1)..(1369): Ortholog of  Ceres SEQ ID NO 13596816 as cited in SEQ ID NO 62287

SEQ ID NO: 117227 - protein, 455 aa, Arabidopsis thaliana; identical to SEQ ID NO: 105988
  peptide (1)..(455): Ceres Seq. ID no. 13618506

SEQ ID NO: 117228 - protein, 453 aa, Arabidopsis thaliana; identical to SEQ ID NO: 105989
  peptide (1)..(453): Ceres Seq. ID no. 13618507

SEQ ID NO: 117229 - protein, 342 aa, Arabidopsis thaliana; identical to SEQ ID NO: 105990
  peptide (1)..(342): Ceres Seq. ID no. 13618508

SEQ ID NO: 117230 - DNA, 1693 bp, Arabidopsis thaliana; identical to SEQ ID NO: 105991
  misc_feature (1)..(1693): Ceres Seq. ID no. 13618509
  misc_feature (1)..(1693): Ortholog of  Ceres SEQ ID NO 12617887 as cited in SEQ ID NO 65526

SEQ ID NO: 117231 - protein, 410 aa, Arabidopsis thaliana; identical to SEQ ID NO: 21105
  peptide (1)..(410): Ceres Seq. ID no. 13618510

SEQ ID NO: 117232 - protein, 404 aa, Arabidopsis thaliana; identical to SEQ ID NO: 21106
  peptide (1)..(404): Ceres Seq. ID no. 13618511

SEQ ID NO: 117233 - protein, 391 aa, Arabidopsis thaliana; identical to SEQ ID NO: 21107
  peptide (1)..(391): Ceres Seq. ID no. 13618512

SEQ ID NO: 117234 - DNA, 1494 bp, Arabidopsis thaliana; identical to SEQ ID NO: 105995
  misc_feature (1)..(1494): Ceres Seq. ID no. 13618517
  misc_feature (1)..(1494): Ortholog of  Ceres SEQ ID NO 13597740 as cited in SEQ ID NO 64482
  misc_feature (1)..(1494): Ortholog of  Ceres SEQ ID NO 13596056 as cited in SEQ ID NO 68307
  misc_feature (1)..(1494): Ortholog of  Ceres SEQ ID NO 12388689 as cited in SEQ ID NO 0

SEQ ID NO: 117235 - protein, 372 aa, Arabidopsis thaliana; identical to SEQ ID NO: 35940
  peptide (1)..(372): Ceres Seq. ID no. 13618518

SEQ ID NO: 117236 - protein, 348 aa, Arabidopsis thaliana; identical to SEQ ID NO: 35941
  peptide (1)..(348): Ceres Seq. ID no. 13618519

SEQ ID NO: 117237 - DNA, 1401 bp, Arabidopsis thaliana; identical to SEQ ID NO: 105998
  misc_feature (1)..(1401): Ceres Seq. ID no. 13618520
  misc_feature (1)..(1401): Ortholog of  Ceres SEQ ID NO 13582332 as cited in SEQ ID NO 59890

SEQ ID NO: 117238 - protein, 361 aa, Arabidopsis thaliana; identical to SEQ ID NO: 24738
  peptide (1)..(361): Ceres Seq. ID no. 13618521

SEQ ID NO: 117239 - protein, 355 aa, Arabidopsis thaliana; identical to SEQ ID NO: 24739
  peptide (1)..(355): Ceres Seq. ID no. 13618522

SEQ ID NO: 117240 - protein, 335 aa, Arabidopsis thaliana; identical to SEQ ID NO: 24740
  peptide (1)..(335): Ceres Seq. ID no. 13618523

SEQ ID NO: 117241 - DNA, 930 bp, Arabidopsis thaliana; identical to SEQ ID NO: 106002
  misc_feature (1)..(930): Ceres Seq. ID no. 13618530
  misc_feature (1)..(930): Ortholog of  Ceres SEQ ID NO 13584593 as cited in SEQ ID NO 65340

SEQ ID NO: 117242 - protein, 213 aa, Arabidopsis thaliana; identical to SEQ ID NO: 23177
  peptide (1)..(213): Ceres Seq. ID no. 13618531

SEQ ID NO: 117243 - DNA, 818 bp, Arabidopsis thaliana; identical to SEQ ID NO: 106004
  misc_feature (1)..(818): Ceres Seq. ID no. 13618553
  misc_feature (1)..(818): Ortholog of  Ceres SEQ ID NO 15226744 as cited in SEQ ID NO 61720

SEQ ID NO: 117244 - protein, 232 aa, Arabidopsis thaliana; identical to SEQ ID NO: 106005
  peptide (1)..(232): Ceres Seq. ID no. 13618554

SEQ ID NO: 117245 - protein, 225 aa, Arabidopsis thaliana; identical to SEQ ID NO: 106006
  peptide (1)..(225): Ceres Seq. ID no. 13618555

SEQ ID NO: 117246 - DNA, 1112 bp, Arabidopsis thaliana; identical to SEQ ID NO: 106007
  misc_feature (1)..(1112): Ceres Seq. ID no. 13618564
  misc_feature (1)..(1112): Ortholog of  Ceres SEQ ID NO 15179996 as cited in SEQ ID NO 0

SEQ ID NO: 117247 - protein, 302 aa, Arabidopsis thaliana; identical to SEQ ID NO: 106008
  peptide (1)..(302): Ceres Seq. ID no. 13618565

SEQ ID NO: 117248 - protein, 188 aa, Arabidopsis thaliana; identical to SEQ ID NO: 106009
  peptide (1)..(188): Ceres Seq. ID no. 13618566

SEQ ID NO: 117249 - protein, 172 aa, Arabidopsis thaliana; identical to SEQ ID NO: 106010
  peptide (1)..(172): Ceres Seq. ID no. 13618567

SEQ ID NO: 117250 - DNA, 1240 bp, Arabidopsis thaliana; identical to SEQ ID NO: 106011
  misc_feature (1)..(1240): Ceres Seq. ID no. 13618572
  misc_feature (1)..(1240): Ortholog of  Ceres SEQ ID NO 13597854 as cited in SEQ ID NO 64292

SEQ ID NO: 117251 - protein, 309 aa, Arabidopsis thaliana; identical to SEQ ID NO: 39716
  peptide (1)..(309): Ceres Seq. ID no. 13618573

SEQ ID NO: 117252 - protein, 163 aa, Arabidopsis thaliana; identical to SEQ ID NO: 39717
  peptide (1)..(163): Ceres Seq. ID no. 13618574

SEQ ID NO: 117253 - DNA, 1933 bp, Arabidopsis thaliana; identical to SEQ ID NO: 106014
  misc_feature (1)..(1933): Ceres Seq. ID no. 13618575
  misc_feature (1)..(1933): Ortholog of  Ceres SEQ ID NO 14313167 as cited in SEQ ID NO 54354

SEQ ID NO: 117254 - protein, 563 aa, Arabidopsis thaliana; identical to SEQ ID NO: 106015
  peptide (1)..(563): Ceres Seq. ID no. 13618576

SEQ ID NO: 117255 - protein, 541 aa, Arabidopsis thaliana; identical to SEQ ID NO: 106016
  peptide (1)..(541): Ceres Seq. ID no. 13618577

SEQ ID NO: 117256 - protein, 425 aa, Arabidopsis thaliana; identical to SEQ ID NO: 106017
  peptide (1)..(425): Ceres Seq. ID no. 13618578

SEQ ID NO: 117257 - DNA, 1658 bp, Arabidopsis thaliana; identical to SEQ ID NO: 106018
  misc_feature (1)..(1658): Ceres Seq. ID no. 13618587
  misc_feature (1)..(1658): Ortholog of  Ceres SEQ ID NO 15172476 as cited in SEQ ID NO 54945
  misc_feature (1)..(1658): Ortholog of  Ceres SEQ ID NO 13654989 as cited in SEQ ID NO 63117
  misc_feature (1)..(1658): Ortholog of  Ceres SEQ ID NO 13584744 as cited in SEQ ID NO 69137

SEQ ID NO: 117258 - protein, 484 aa, Arabidopsis thaliana; identical to SEQ ID NO: 106019
  peptide (1)..(484): Ceres Seq. ID no. 13618588

SEQ ID NO: 117259 - protein, 442 aa, Arabidopsis thaliana; identical to SEQ ID NO: 106020
  peptide (1)..(442): Ceres Seq. ID no. 13618589

SEQ ID NO: 117260 - protein, 335 aa, Arabidopsis thaliana; identical to SEQ ID NO: 106021
  peptide (1)..(335): Ceres Seq. ID no. 13618590

SEQ ID NO: 117261 - DNA, 986 bp, Arabidopsis thaliana; identical to SEQ ID NO: 106022
  misc_feature (1)..(986): Ceres Seq. ID no. 13618591
  misc_feature (1)..(986): Ortholog of  Ceres SEQ ID NO 12608620 as cited in SEQ ID NO 60192
  misc_feature (1)..(986): Ortholog of  Ceres SEQ ID NO 15173077 as cited in SEQ ID NO 64566
  misc_feature (1)..(986): Ortholog of  Ceres SEQ ID NO 13662898 as cited in SEQ ID NO 66199
  misc_feature (1)..(986): Ortholog of  Ceres SEQ ID NO 13654314 as cited in SEQ ID NO 67914

SEQ ID NO: 117262 - protein, 251 aa, Arabidopsis thaliana; identical to SEQ ID NO: 35363
  peptide (1)..(251): Ceres Seq. ID no. 13618592

SEQ ID NO: 117263 - protein, 188 aa, Arabidopsis thaliana; identical to SEQ ID NO: 35364
  peptide (1)..(188): Ceres Seq. ID no. 13618593

SEQ ID NO: 117264 - protein, 142 aa, Arabidopsis thaliana; identical to SEQ ID NO: 35365
  peptide (1)..(142): Ceres Seq. ID no. 13618594

SEQ ID NO: 117265 - DNA, 1283 bp, Arabidopsis thaliana; identical to SEQ ID NO: 106026
  misc_feature (1)..(1283): Ceres Seq. ID no. 13618595
  misc_feature (1)..(1283): Ortholog of  Ceres SEQ ID NO 13639645 as cited in SEQ ID NO 57488

SEQ ID NO: 117266 - protein, 361 aa, Arabidopsis thaliana; identical to SEQ ID NO: 106027
  peptide (1)..(361): Ceres Seq. ID no. 13618596

SEQ ID NO: 117267 - protein, 358 aa, Arabidopsis thaliana; identical to SEQ ID NO: 106028
  peptide (1)..(358): Ceres Seq. ID no. 13618597

SEQ ID NO: 117268 - protein, 341 aa, Arabidopsis thaliana; identical to SEQ ID NO: 106029
  peptide (1)..(341): Ceres Seq. ID no. 13618598

SEQ ID NO: 117269 - DNA, 1108 bp, Arabidopsis thaliana; identical to SEQ ID NO: 106030
  misc_feature (1)..(1108): Ceres Seq. ID no. 13618602
  misc_feature (1)..(1108): Ortholog of  Ceres SEQ ID NO 13581579 as cited in SEQ ID NO 58361
  misc_feature (1)..(1108): Ortholog of  Ceres SEQ ID NO 13596474 as cited in SEQ ID NO 62169
  misc_feature (1)..(1108): Ortholog of  Ceres SEQ ID NO 13598714 as cited in SEQ ID NO 62656
  misc_feature (1)..(1108): Ortholog of  Ceres SEQ ID NO 13597519 as cited in SEQ ID NO 64759
  misc_feature (1)..(1108): Ortholog of  Ceres SEQ ID NO 13597870 as cited in SEQ ID NO 64982
  misc_feature (1)..(1108): Ortholog of  Ceres SEQ ID NO 13595926 as cited in SEQ ID NO 67778
  misc_feature (1)..(1108): Ortholog of  Ceres SEQ ID NO 12567001 as cited in SEQ ID NO 0

SEQ ID NO: 117270 - protein, 324 aa, Arabidopsis thaliana; identical to SEQ ID NO: 106031
  peptide (1)..(324): Ceres Seq. ID no. 13618603

SEQ ID NO: 117271 - protein, 316 aa, Arabidopsis thaliana; identical to SEQ ID NO: 30085
  peptide (1)..(316): Ceres Seq. ID no. 13618604

SEQ ID NO: 117272 - DNA, 1181 bp, Arabidopsis thaliana; identical to SEQ ID NO: 106033
  misc_feature (1)..(1181): Ceres Seq. ID no. 13618615
  misc_feature (1)..(1181): Ortholog of  Ceres SEQ ID NO 13639124 as cited in SEQ ID NO 56718
  misc_feature (1)..(1181): Ortholog of  Ceres SEQ ID NO 13596474 as cited in SEQ ID NO 62169
  misc_feature (1)..(1181): Ortholog of  Ceres SEQ ID NO 13598714 as cited in SEQ ID NO 62656
  misc_feature (1)..(1181): Ortholog of  Ceres SEQ ID NO 13596969 as cited in SEQ ID NO 63375
  misc_feature (1)..(1181): Ortholog of  Ceres SEQ ID NO 14302240 as cited in SEQ ID NO 64162
  misc_feature (1)..(1181): Ortholog of  Ceres SEQ ID NO 13584480 as cited in SEQ ID NO 64751
  misc_feature (1)..(1181): Ortholog of  Ceres SEQ ID NO 13597519 as cited in SEQ ID NO 64759
  misc_feature (1)..(1181): Ortholog of  Ceres SEQ ID NO 13595926 as cited in SEQ ID NO 67778
  misc_feature (1)..(1181): Ortholog of  Ceres SEQ ID NO 13596362 as cited in SEQ ID NO 67877
  misc_feature (1)..(1181): Ortholog of  Ceres SEQ ID NO 13587054 as cited in SEQ ID NO 0

SEQ ID NO: 117273 - protein, 333 aa, Arabidopsis thaliana; identical to SEQ ID NO: 106034
  peptide (1)..(333): Ceres Seq. ID no. 13618616

SEQ ID NO: 117274 - protein, 325 aa, Arabidopsis thaliana; identical to SEQ ID NO: 106035
  peptide (1)..(325): Ceres Seq. ID no. 13618617

SEQ ID NO: 117275 - protein, 314 aa, Arabidopsis thaliana; identical to SEQ ID NO: 21993
  peptide (1)..(314): Ceres Seq. ID no. 13618618

SEQ ID NO: 117276 - DNA, 1623 bp, Arabidopsis thaliana; identical to SEQ ID NO: 106037
  misc_feature (1)..(1623): Ceres Seq. ID no. 13618629
  misc_feature (1)..(1623): Ortholog of  Ceres SEQ ID NO 12784451 as cited in SEQ ID NO 66483

SEQ ID NO: 117277 - protein, 466 aa, Arabidopsis thaliana; identical to SEQ ID NO: 21125
  peptide (1)..(466): Ceres Seq. ID no. 13618630

SEQ ID NO: 117278 - protein, 414 aa, Arabidopsis thaliana; identical to SEQ ID NO: 21126
  peptide (1)..(414): Ceres Seq. ID no. 13618631

SEQ ID NO: 117279 - protein, 380 aa, Arabidopsis thaliana; identical to SEQ ID NO: 21127
  peptide (1)..(380): Ceres Seq. ID no. 13618632

SEQ ID NO: 117280 - DNA, 1311 bp, Arabidopsis thaliana; identical to SEQ ID NO: 106041
  misc_feature (1)..(1311): Ceres Seq. ID no. 13618633
  misc_feature (1)..(1311): Ortholog of  Ceres SEQ ID NO 14315440 as cited in SEQ ID NO 57161

SEQ ID NO: 117281 - protein, 159 aa, Arabidopsis thaliana; identical to SEQ ID NO: 25285
  peptide (1)..(159): Ceres Seq. ID no. 13618634

SEQ ID NO: 117282 - protein, 136 aa, Arabidopsis thaliana; identical to SEQ ID NO: 25286
  peptide (1)..(136): Ceres Seq. ID no. 13618635

SEQ ID NO: 117283 - protein, 128 aa, Arabidopsis thaliana; identical to SEQ ID NO: 25287
  peptide (1)..(128): Ceres Seq. ID no. 13618636

SEQ ID NO: 117284 - DNA, 1608 bp, Arabidopsis thaliana; identical to SEQ ID NO: 106045
  misc_feature (1)..(1608): Ceres Seq. ID no. 13618637
  misc_feature (1)..(1608): Ortholog of  Ceres SEQ ID NO 13592768 as cited in SEQ ID NO 20317
  misc_feature (1)..(1608): Ortholog of  Ceres SEQ ID NO 14303656 as cited in SEQ ID NO 61363

SEQ ID NO: 117285 - protein, 368 aa, Arabidopsis thaliana; identical to SEQ ID NO: 21997
  peptide (1)..(368): Ceres Seq. ID no. 13618638

SEQ ID NO: 117286 - protein, 251 aa, Arabidopsis thaliana; identical to SEQ ID NO: 21998
  peptide (1)..(251): Ceres Seq. ID no. 13618639

SEQ ID NO: 117287 - protein, 244 aa, Arabidopsis thaliana; identical to SEQ ID NO: 21999
  peptide (1)..(244): Ceres Seq. ID no. 13618640

SEQ ID NO: 117288 - DNA, 1292 bp, Arabidopsis thaliana; identical to SEQ ID NO: 106049
  misc_feature (1)..(1292): Ceres Seq. ID no. 13618643
  misc_feature (1)..(1292): Ortholog of  Ceres SEQ ID NO 14311590 as cited in SEQ ID NO 51709

SEQ ID NO: 117289 - protein, 261 aa, Arabidopsis thaliana; identical to SEQ ID NO: 35160
  peptide (1)..(261): Ceres Seq. ID no. 13618644

SEQ ID NO: 117290 - protein, 243 aa, Arabidopsis thaliana; identical to SEQ ID NO: 35161
  peptide (1)..(243): Ceres Seq. ID no. 13618645

SEQ ID NO: 117291 - protein, 233 aa, Arabidopsis thaliana; identical to SEQ ID NO: 35162
  peptide (1)..(233): Ceres Seq. ID no. 13618646

SEQ ID NO: 117292 - DNA, 834 bp, Arabidopsis thaliana; identical to SEQ ID NO: 106053
  misc_feature (1)..(834): Ceres Seq. ID no. 13618647
  misc_feature (1)..(834): Ortholog of  Ceres SEQ ID NO 15172705 as cited in SEQ ID NO 56069
  misc_feature (1)..(834): Ortholog of  Ceres SEQ ID NO 12635657 as cited in SEQ ID NO 0
  misc_feature (1)..(834): Ortholog of  Ceres SEQ ID NO 12635879 as cited in SEQ ID NO 0
  misc_feature (1)..(834): Ortholog of  Ceres SEQ ID NO 13599649 as cited in SEQ ID NO 0
  misc_feature (1)..(834): Ortholog of  Ceres SEQ ID NO 14309205 as cited in SEQ ID NO 0
  misc_feature (1)..(834): Ortholog of  Ceres SEQ ID NO 15177492 as cited in SEQ ID NO 0

SEQ ID NO: 117293 - protein, 190 aa, Arabidopsis thaliana; identical to SEQ ID NO: 106054
  peptide (1)..(190): Ceres Seq. ID no. 13618648

SEQ ID NO: 117294 - protein, 172 aa, Arabidopsis thaliana; identical to SEQ ID NO: 25632
  peptide (1)..(172): Ceres Seq. ID no. 13618649

SEQ ID NO: 117295 - protein, 163 aa, Arabidopsis thaliana; identical to SEQ ID NO: 25633
  peptide (1)..(163): Ceres Seq. ID no. 13618650

SEQ ID NO: 117296 - DNA, 1299 bp, Arabidopsis thaliana; identical to SEQ ID NO: 106057
  misc_feature (1)..(1299): Ceres Seq. ID no. 13618654
  misc_feature (1)..(1299): Ortholog of  Ceres SEQ ID NO 14308787 as cited in SEQ ID NO 55614
  misc_feature (1)..(1299): Ortholog of  Ceres SEQ ID NO 13656547 as cited in SEQ ID NO 65935

SEQ ID NO: 117297 - protein, 392 aa, Arabidopsis thaliana; identical to SEQ ID NO: 106058
  peptide (1)..(392): Ceres Seq. ID no. 13618655

SEQ ID NO: 117298 - protein, 358 aa, Arabidopsis thaliana; identical to SEQ ID NO: 106059
  peptide (1)..(358): Ceres Seq. ID no. 13618656

SEQ ID NO: 117299 - protein, 319 aa, Arabidopsis thaliana; identical to SEQ ID NO: 106060
  peptide (1)..(319): Ceres Seq. ID no. 13618657

SEQ ID NO: 117300 - DNA, 1171 bp, Arabidopsis thaliana; identical to SEQ ID NO: 106061
  misc_feature (1)..(1171): Ceres Seq. ID no. 13618658
  misc_feature (1)..(1171): Ortholog of  Ceres SEQ ID NO 15175666 as cited in SEQ ID NO 54985
  misc_feature (1)..(1171): Ortholog of  Ceres SEQ ID NO 14310460 as cited in SEQ ID NO 55105
  misc_feature (1)..(1171): Ortholog of  Ceres SEQ ID NO 13597740 as cited in SEQ ID NO 64482
  misc_feature (1)..(1171): Ortholog of  Ceres SEQ ID NO 15179888 as cited in SEQ ID NO 66879
  misc_feature (1)..(1171): Ortholog of  Ceres SEQ ID NO 13596056 as cited in SEQ ID NO 68307
  misc_feature (1)..(1171): Ortholog of  Ceres SEQ ID NO 12388689 as cited in SEQ ID NO 0

SEQ ID NO: 117301 - protein, 287 aa, Arabidopsis thaliana; identical to SEQ ID NO: 35212
  peptide (1)..(287): Ceres Seq. ID no. 13618659

SEQ ID NO: 117302 - protein, 254 aa, Arabidopsis thaliana; identical to SEQ ID NO: 35213
  peptide (1)..(254): Ceres Seq. ID no. 13618660

SEQ ID NO: 117303 - DNA, 1347 bp, Arabidopsis thaliana; identical to SEQ ID NO: 106064
  misc_feature (1)..(1347): Ceres Seq. ID no. 13618661
  misc_feature (1)..(1347): Ortholog of  Ceres SEQ ID NO 13654989 as cited in SEQ ID NO 63117
  misc_feature (1)..(1347): Ortholog of  Ceres SEQ ID NO 13657138 as cited in SEQ ID NO 65923
  misc_feature (1)..(1347): Ortholog of  Ceres SEQ ID NO 13584744 as cited in SEQ ID NO 69137

SEQ ID NO: 117304 - protein, 448 aa, Arabidopsis thaliana; identical to SEQ ID NO: 106065
  peptide (1)..(448): Ceres Seq. ID no. 13618662

SEQ ID NO: 117305 - protein, 392 aa, Arabidopsis thaliana; identical to SEQ ID NO: 106066
  peptide (1)..(392): Ceres Seq. ID no. 13618663

SEQ ID NO: 117306 - protein, 307 aa, Arabidopsis thaliana; identical to SEQ ID NO: 106067
  peptide (1)..(307): Ceres Seq. ID no. 13618664

SEQ ID NO: 117307 - DNA, 1416 bp, Arabidopsis thaliana; identical to SEQ ID NO: 106068
  misc_feature (1)..(1416): Ceres Seq. ID no. 13618669
  misc_feature (1)..(1416): Ortholog of  Ceres SEQ ID NO 14303843 as cited in SEQ ID NO 53775
  misc_feature (1)..(1416): Ortholog of  Ceres SEQ ID NO 15179800 as cited in SEQ ID NO 58215
  misc_feature (1)..(1416): Ortholog of  Ceres SEQ ID NO 13654549 as cited in SEQ ID NO 68530

SEQ ID NO: 117308 - protein, 381 aa, Arabidopsis thaliana; identical to SEQ ID NO: 29711
  peptide (1)..(381): Ceres Seq. ID no. 13618670

SEQ ID NO: 117309 - protein, 365 aa, Arabidopsis thaliana; identical to SEQ ID NO: 29712
  peptide (1)..(365): Ceres Seq. ID no. 13618671

SEQ ID NO: 117310 - protein, 191 aa, Arabidopsis thaliana; identical to SEQ ID NO: 29713
  peptide (1)..(191): Ceres Seq. ID no. 13618672

SEQ ID NO: 117311 - DNA, 1214 bp, Arabidopsis thaliana; identical to SEQ ID NO: 106072
  misc_feature (1)..(1214): Ceres Seq. ID no. 13618673
  misc_feature (1)..(1214): Ortholog of  Ceres SEQ ID NO 15168549 as cited in SEQ ID NO 56976
  misc_feature (1)..(1214): Ortholog of  Ceres SEQ ID NO 15177588 as cited in SEQ ID NO 60367

SEQ ID NO: 117312 - protein, 280 aa, Arabidopsis thaliana; identical to SEQ ID NO: 24848
  peptide (1)..(280): Ceres Seq. ID no. 13618674

SEQ ID NO: 117313 - protein, 253 aa, Arabidopsis thaliana; identical to SEQ ID NO: 24849
  peptide (1)..(253): Ceres Seq. ID no. 13618675

SEQ ID NO: 117314 - protein, 198 aa, Arabidopsis thaliana; identical to SEQ ID NO: 24850
  peptide (1)..(198): Ceres Seq. ID no. 13618676

SEQ ID NO: 117315 - DNA, 1242 bp, Arabidopsis thaliana; identical to SEQ ID NO: 106076
  misc_feature (1)..(1242): Ceres Seq. ID no. 13618681
  misc_feature (1)..(1242): Ortholog of  Ceres SEQ ID NO 13596090 as cited in SEQ ID NO 68377

SEQ ID NO: 117316 - protein, 294 aa, Arabidopsis thaliana; identical to SEQ ID NO: 106077
  peptide (1)..(294): Ceres Seq. ID no. 13618682

SEQ ID NO: 117317 - protein, 211 aa, Arabidopsis thaliana; identical to SEQ ID NO: 106078
  peptide (1)..(211): Ceres Seq. ID no. 13618683

SEQ ID NO: 117318 - protein, 195 aa, Arabidopsis thaliana; identical to SEQ ID NO: 106079
  peptide (1)..(195): Ceres Seq. ID no. 13618684

SEQ ID NO: 117319 - DNA, 1658 bp, Arabidopsis thaliana; identical to SEQ ID NO: 106080
  misc_feature (1)..(1658): Ceres Seq. ID no. 13618693
  misc_feature (1)..(1658): Ortholog of  Ceres SEQ ID NO 13599859 as cited in SEQ ID NO 1323
  misc_feature (1)..(1658): Ortholog of  Ceres SEQ ID NO 13596244 as cited in SEQ ID NO 69307

SEQ ID NO: 117320 - protein, 376 aa, Arabidopsis thaliana; identical to SEQ ID NO: 106081
  peptide (1)..(376): Ceres Seq. ID no. 13618694

SEQ ID NO: 117321 - protein, 334 aa, Arabidopsis thaliana; identical to SEQ ID NO: 106082
  peptide (1)..(334): Ceres Seq. ID no. 13618695

SEQ ID NO: 117322 - protein, 303 aa, Arabidopsis thaliana; identical to SEQ ID NO: 106083
  peptide (1)..(303): Ceres Seq. ID no. 13618696

SEQ ID NO: 117323 - DNA, 846 bp, Arabidopsis thaliana; identical to SEQ ID NO: 106084
  misc_feature (1)..(846): Ceres Seq. ID no. 13618697
  misc_feature (1)..(846): Ortholog of  Ceres SEQ ID NO 13583718 as cited in SEQ ID NO 63252

SEQ ID NO: 117324 - protein, 203 aa, Arabidopsis thaliana; identical to SEQ ID NO: 106085
  peptide (1)..(203): Ceres Seq. ID no. 13618698

SEQ ID NO: 117325 - protein, 186 aa, Arabidopsis thaliana; identical to SEQ ID NO: 106086
  peptide (1)..(186): Ceres Seq. ID no. 13618699

SEQ ID NO: 117326 - protein, 158 aa, Arabidopsis thaliana; identical to SEQ ID NO: 106087
  peptide (1)..(158): Ceres Seq. ID no. 13618700

SEQ ID NO: 117327 - DNA, 1531 bp, Arabidopsis thaliana; identical to SEQ ID NO: 106088
  misc_feature (1)..(1531): Ceres Seq. ID no. 13618711
  misc_feature (1)..(1531): Ortholog of  Ceres SEQ ID NO 15177947 as cited in SEQ ID NO 60308

SEQ ID NO: 117328 - protein, 357 aa, Arabidopsis thaliana; identical to SEQ ID NO: 21021
  peptide (1)..(357): Ceres Seq. ID no. 13618712

SEQ ID NO: 117329 - protein, 329 aa, Arabidopsis thaliana; identical to SEQ ID NO: 21022
  peptide (1)..(329): Ceres Seq. ID no. 13618713

SEQ ID NO: 117330 - protein, 322 aa, Arabidopsis thaliana; identical to SEQ ID NO: 21023
  peptide (1)..(322): Ceres Seq. ID no. 13618714

SEQ ID NO: 117331 - DNA, 1135 bp, Arabidopsis thaliana; identical to SEQ ID NO: 106092
  misc_feature (1)..(1135): Ceres Seq. ID no. 13618734
  misc_feature (1)..(1135): Ortholog of  Ceres SEQ ID NO 12609214 as cited in SEQ ID NO 52165

SEQ ID NO: 117332 - protein, 304 aa, Arabidopsis thaliana; identical to SEQ ID NO: 106093
  peptide (1)..(304): Ceres Seq. ID no. 13618735

SEQ ID NO: 117333 - protein, 302 aa, Arabidopsis thaliana; identical to SEQ ID NO: 106094
  peptide (1)..(302): Ceres Seq. ID no. 13618736

SEQ ID NO: 117334 - protein, 292 aa, Arabidopsis thaliana; identical to SEQ ID NO: 106095
  peptide (1)..(292): Ceres Seq. ID no. 13618737

SEQ ID NO: 117335 - DNA, 1203 bp, Arabidopsis thaliana; identical to SEQ ID NO: 106096
  misc_feature (1)..(1203): Ceres Seq. ID no. 13618744
  misc_feature (1)..(1203): Ortholog of  Ceres SEQ ID NO 12583421 as cited in SEQ ID NO 56410
  misc_feature (1)..(1203): Ortholog of  Ceres SEQ ID NO 15169300 as cited in SEQ ID NO 59572
  misc_feature (1)..(1203): Ortholog of  Ceres SEQ ID NO 15176407 as cited in SEQ ID NO 59620
  misc_feature (1)..(1203): Ortholog of  Ceres SEQ ID NO 13596876 as cited in SEQ ID NO 62696
  misc_feature (1)..(1203): Ortholog of  Ceres SEQ ID NO 13655442 as cited in SEQ ID NO 64359

SEQ ID NO: 117336 - protein, 324 aa, Arabidopsis thaliana; identical to SEQ ID NO: 106097
  peptide (1)..(324): Ceres Seq. ID no. 13618745

SEQ ID NO: 117337 - protein, 316 aa, Arabidopsis thaliana; identical to SEQ ID NO: 28039
  peptide (1)..(316): Ceres Seq. ID no. 13618746

SEQ ID NO: 117338 - protein, 275 aa, Arabidopsis thaliana; identical to SEQ ID NO: 28040
  peptide (1)..(275): Ceres Seq. ID no. 13618747

SEQ ID NO: 117339 - DNA, 965 bp, Arabidopsis thaliana; identical to SEQ ID NO: 106100
  misc_feature (1)..(965): Ceres Seq. ID no. 13618748
  misc_feature (1)..(965): Ortholog of  Ceres SEQ ID NO 12583421 as cited in SEQ ID NO 56410
  misc_feature (1)..(965): Ortholog of  Ceres SEQ ID NO 15176407 as cited in SEQ ID NO 59620
  misc_feature (1)..(965): Ortholog of  Ceres SEQ ID NO 13596876 as cited in SEQ ID NO 62696
  misc_feature (1)..(965): Ortholog of  Ceres SEQ ID NO 13655442 as cited in SEQ ID NO 64359
  misc_feature (1)..(965): Ortholog of  Ceres SEQ ID NO 14303652 as cited in SEQ ID NO 67569

SEQ ID NO: 117340 - protein, 288 aa, Arabidopsis thaliana; identical to SEQ ID NO: 106101
  peptide (1)..(288): Ceres Seq. ID no. 13618749

SEQ ID NO: 117341 - protein, 221 aa, Arabidopsis thaliana; identical to SEQ ID NO: 106102
  peptide (1)..(221): Ceres Seq. ID no. 13618750

SEQ ID NO: 117342 - protein, 200 aa, Arabidopsis thaliana; identical to SEQ ID NO: 106103
  peptide (1)..(200): Ceres Seq. ID no. 13618751

SEQ ID NO: 117343 - DNA, 1707 bp, Arabidopsis thaliana; identical to SEQ ID NO: 106104
  misc_feature (1)..(1707): Ceres Seq. ID no. 13618754
  misc_feature (1)..(1707): Ortholog of  Ceres SEQ ID NO 12612314 as cited in SEQ ID NO 51420

SEQ ID NO: 117344 - protein, 500 aa, Arabidopsis thaliana; identical to SEQ ID NO: 21168
  peptide (1)..(500): Ceres Seq. ID no. 13618755

SEQ ID NO: 117345 - protein, 498 aa, Arabidopsis thaliana; identical to SEQ ID NO: 21169
  peptide (1)..(498): Ceres Seq. ID no. 13618756

SEQ ID NO: 117346 - protein, 497 aa, Arabidopsis thaliana; identical to SEQ ID NO: 21170
  peptide (1)..(497): Ceres Seq. ID no. 13618757

SEQ ID NO: 117347 - DNA, 950 bp, Arabidopsis thaliana; identical to SEQ ID NO: 106108
  misc_feature (1)..(950): Ceres Seq. ID no. 13618779
  misc_feature (1)..(950): Ortholog of  Ceres SEQ ID NO 14309328 as cited in SEQ ID NO 0

SEQ ID NO: 117348 - protein, 315 aa, Arabidopsis thaliana; identical to SEQ ID NO: 106109
  peptide (1)..(315): Ceres Seq. ID no. 13618780

SEQ ID NO: 117349 - protein, 294 aa, Arabidopsis thaliana; identical to SEQ ID NO: 84942
  peptide (1)..(294): Ceres Seq. ID no. 13618781

SEQ ID NO: 117350 - protein, 275 aa, Arabidopsis thaliana; identical to SEQ ID NO: 84943
  peptide (1)..(275): Ceres Seq. ID no. 13618782

SEQ ID NO: 117351 - DNA, 1002 bp, Arabidopsis thaliana; identical to SEQ ID NO: 106112
  misc_feature (1)..(1002): Ceres Seq. ID no. 13618790
  misc_feature (1)..(1002): Ortholog of  Ceres SEQ ID NO 13594163 as cited in SEQ ID NO 60426

SEQ ID NO: 117352 - protein, 276 aa, Arabidopsis thaliana; identical to SEQ ID NO: 106113
  peptide (1)..(276): Ceres Seq. ID no. 13618791

SEQ ID NO: 117353 - protein, 261 aa, Arabidopsis thaliana; identical to SEQ ID NO: 106114
  peptide (1)..(261): Ceres Seq. ID no. 13618792

SEQ ID NO: 117354 - protein, 149 aa, Arabidopsis thaliana; identical to SEQ ID NO: 106115
  peptide (1)..(149): Ceres Seq. ID no. 13618793

SEQ ID NO: 117355 - DNA, 625 bp, Arabidopsis thaliana; identical to SEQ ID NO: 106116
  misc_feature (1)..(625): Ceres Seq. ID no. 13618794
  misc_feature (1)..(625): Ortholog of  Ceres SEQ ID NO 12611212 as cited in SEQ ID NO 56066
  misc_feature (1)..(625): Ortholog of  Ceres SEQ ID NO 15178576 as cited in SEQ ID NO 64133

SEQ ID NO: 117356 - protein, 178 aa, Arabidopsis thaliana; identical to SEQ ID NO: 106117
  peptide (1)..(178): Ceres Seq. ID no. 13618795

SEQ ID NO: 117357 - protein, 136 aa, Arabidopsis thaliana; identical to SEQ ID NO: 106118
  peptide (1)..(136): Ceres Seq. ID no. 13618796

SEQ ID NO: 117358 - DNA, 1611 bp, Arabidopsis thaliana; identical to SEQ ID NO: 106119
  misc_feature (1)..(1611): Ceres Seq. ID no. 13618800
  misc_feature (1)..(1611): Ortholog of  Ceres SEQ ID NO 13594209 as cited in SEQ ID NO 59089
  misc_feature (1)..(1611): Ortholog of  Ceres SEQ ID NO 13502874 as cited in SEQ ID NO 66298
  misc_feature (1)..(1611): Ortholog of  Ceres SEQ ID NO 12614124 as cited in SEQ ID NO 68392

SEQ ID NO: 117359 - protein, 502 aa, Arabidopsis thaliana; identical to SEQ ID NO: 37033
  peptide (1)..(502): Ceres Seq. ID no. 13618801

SEQ ID NO: 117360 - protein, 438 aa, Arabidopsis thaliana; identical to SEQ ID NO: 37034
  peptide (1)..(438): Ceres Seq. ID no. 13618802

SEQ ID NO: 117361 - DNA, 1607 bp, Arabidopsis thaliana; identical to SEQ ID NO: 106122
  misc_feature (1)..(1607): Ceres Seq. ID no. 13618803
  misc_feature (1)..(1607): Ortholog of  Ceres SEQ ID NO 13594209 as cited in SEQ ID NO 59089
  misc_feature (1)..(1607): Ortholog of  Ceres SEQ ID NO 14303546 as cited in SEQ ID NO 64893
  misc_feature (1)..(1607): Ortholog of  Ceres SEQ ID NO 13502874 as cited in SEQ ID NO 66298
  misc_feature (1)..(1607): Ortholog of  Ceres SEQ ID NO 12614124 as cited in SEQ ID NO 68392

SEQ ID NO: 117362 - protein, 506 aa, Arabidopsis thaliana; identical to SEQ ID NO: 106123
  peptide (1)..(506): Ceres Seq. ID no. 13618804

SEQ ID NO: 117363 - protein, 500 aa, Arabidopsis thaliana; identical to SEQ ID NO: 38278
  peptide (1)..(500): Ceres Seq. ID no. 13618805

SEQ ID NO: 117364 - protein, 435 aa, Arabidopsis thaliana; identical to SEQ ID NO: 38279
  peptide (1)..(435): Ceres Seq. ID no. 13618806

SEQ ID NO: 117365 - DNA, 674 bp, Arabidopsis thaliana; identical to SEQ ID NO: 106126
  misc_feature (1)..(674): Ceres Seq. ID no. 13618807
  misc_feature (1)..(674): Ortholog of  Ceres SEQ ID NO 12610267 as cited in SEQ ID NO 51993
  misc_feature (1)..(674): Ortholog of  Ceres SEQ ID NO 13495070 as cited in SEQ ID NO 53216
  misc_feature (1)..(674): Ortholog of  Ceres SEQ ID NO 13661333 as cited in SEQ ID NO 61620
  misc_feature (1)..(674): Ortholog of  Ceres SEQ ID NO 13596812 as cited in SEQ ID NO 62283
  misc_feature (1)..(674): Ortholog of  Ceres SEQ ID NO 13623021 as cited in SEQ ID NO 0

SEQ ID NO: 117366 - protein, 141 aa, Arabidopsis thaliana; identical to SEQ ID NO: 106127
  peptide (1)..(141): Ceres Seq. ID no. 13618808

SEQ ID NO: 117367 - protein, 132 aa, Arabidopsis thaliana; identical to SEQ ID NO: 106128
  peptide (1)..(132): Ceres Seq. ID no. 13618809

SEQ ID NO: 117368 - protein, 130 aa, Arabidopsis thaliana; identical to SEQ ID NO: 73917
  peptide (1)..(130): Ceres Seq. ID no. 13618810

SEQ ID NO: 117369 - DNA, 908 bp, Arabidopsis thaliana; identical to SEQ ID NO: 106130
  misc_feature (1)..(908): Ceres Seq. ID no. 13618823
  misc_feature (1)..(908): Ortholog of  Ceres SEQ ID NO 12610239 as cited in SEQ ID NO 56199
  misc_feature (1)..(908): Ortholog of  Ceres SEQ ID NO 12782126 as cited in SEQ ID NO 60168

SEQ ID NO: 117370 - protein, 228 aa, Arabidopsis thaliana; identical to SEQ ID NO: 106131
  peptide (1)..(228): Ceres Seq. ID no. 13618824

SEQ ID NO: 117371 - protein, 195 aa, Arabidopsis thaliana; identical to SEQ ID NO: 106132
  peptide (1)..(195): Ceres Seq. ID no. 13618825

SEQ ID NO: 117372 - protein, 191 aa, Arabidopsis thaliana; identical to SEQ ID NO: 27974
  peptide (1)..(191): Ceres Seq. ID no. 13618826

SEQ ID NO: 117373 - DNA, 1794 bp, Arabidopsis thaliana; identical to SEQ ID NO: 106134
  misc_feature (1)..(1794): Ceres Seq. ID no. 13618836
  misc_feature (1)..(1794): Ortholog of  Ceres SEQ ID NO 12625388 as cited in SEQ ID NO 63299

SEQ ID NO: 117374 - protein, 453 aa, Arabidopsis thaliana; identical to SEQ ID NO: 39108
  peptide (1)..(453): Ceres Seq. ID no. 13618837

SEQ ID NO: 117375 - protein, 449 aa, Arabidopsis thaliana; identical to SEQ ID NO: 39109
  peptide (1)..(449): Ceres Seq. ID no. 13618838

SEQ ID NO: 117376 - protein, 410 aa, Arabidopsis thaliana; identical to SEQ ID NO: 39110
  peptide (1)..(410): Ceres Seq. ID no. 13618839

SEQ ID NO: 117377 - DNA, 810 bp, Arabidopsis thaliana; identical to SEQ ID NO: 106138
  misc_feature (1)..(810): Ceres Seq. ID no. 13618840
  misc_feature (1)..(810): Ortholog of  Ceres SEQ ID NO 14306814 as cited in SEQ ID NO 56370
  misc_feature (1)..(810): Ortholog of  Ceres SEQ ID NO 13662830 as cited in SEQ ID NO 61566
  misc_feature (1)..(810): Ortholog of  Ceres SEQ ID NO 14309275 as cited in SEQ ID NO 0

SEQ ID NO: 117378 - protein, 134 aa, Arabidopsis thaliana; identical to SEQ ID NO: 36011
  peptide (1)..(134): Ceres Seq. ID no. 13618841

SEQ ID NO: 117379 - protein, 109 aa, Arabidopsis thaliana; identical to SEQ ID NO: 36012
  peptide (1)..(109): Ceres Seq. ID no. 13618842

SEQ ID NO: 117380 - DNA, 1449 bp, Arabidopsis thaliana; identical to SEQ ID NO: 106141
  misc_feature (1)..(1449): Ceres Seq. ID no. 13618847
  misc_feature (1)..(1449): Ortholog of  Ceres SEQ ID NO 14315418 as cited in SEQ ID NO 57506

SEQ ID NO: 117381 - protein, 411 aa, Arabidopsis thaliana; identical to SEQ ID NO: 28871
  peptide (1)..(411): Ceres Seq. ID no. 13618848

SEQ ID NO: 117382 - protein, 392 aa, Arabidopsis thaliana; identical to SEQ ID NO: 28872
  peptide (1)..(392): Ceres Seq. ID no. 13618849

SEQ ID NO: 117383 - protein, 316 aa, Arabidopsis thaliana; identical to SEQ ID NO: 28873
  peptide (1)..(316): Ceres Seq. ID no. 13618850

SEQ ID NO: 117384 - DNA, 1296 bp, Arabidopsis thaliana; identical to SEQ ID NO: 106145
  misc_feature (1)..(1296): Ceres Seq. ID no. 13618851
  misc_feature (1)..(1296): Ortholog of  Ceres SEQ ID NO 14312769 as cited in SEQ ID NO 55493
  misc_feature (1)..(1296): Ortholog of  Ceres SEQ ID NO 13639300 as cited in SEQ ID NO 56701

SEQ ID NO: 117385 - protein, 379 aa, Arabidopsis thaliana; identical to SEQ ID NO: 106146
  peptide (1)..(379): Ceres Seq. ID no. 13618852

SEQ ID NO: 117386 - protein, 346 aa, Arabidopsis thaliana; identical to SEQ ID NO: 40525
  peptide (1)..(346): Ceres Seq. ID no. 13618853

SEQ ID NO: 117387 - protein, 317 aa, Arabidopsis thaliana; identical to SEQ ID NO: 40526
  peptide (1)..(317): Ceres Seq. ID no. 13618854

SEQ ID NO: 117388 - DNA, 1423 bp, Arabidopsis thaliana; identical to SEQ ID NO: 106149
  misc_feature (1)..(1423): Ceres Seq. ID no. 13618855
  misc_feature (1)..(1423): Ortholog of  Ceres SEQ ID NO 13595525 as cited in SEQ ID NO 56679
  misc_feature (1)..(1423): Ortholog of  Ceres SEQ ID NO 15226984 as cited in SEQ ID NO 62173
  misc_feature (1)..(1423): Ortholog of  Ceres SEQ ID NO 14302236 as cited in SEQ ID NO 68793

SEQ ID NO: 117389 - protein, 398 aa, Arabidopsis thaliana; identical to SEQ ID NO: 41856
  peptide (1)..(398): Ceres Seq. ID no. 13618856

SEQ ID NO: 117390 - protein, 271 aa, Arabidopsis thaliana; identical to SEQ ID NO: 41857
  peptide (1)..(271): Ceres Seq. ID no. 13618857

SEQ ID NO: 117391 - protein, 250 aa, Arabidopsis thaliana; identical to SEQ ID NO: 41858
  peptide (1)..(250): Ceres Seq. ID no. 13618858

SEQ ID NO: 117392 - DNA, 861 bp, Arabidopsis thaliana; identical to SEQ ID NO: 106153
  misc_feature (1)..(861): Ceres Seq. ID no. 13618865
  misc_feature (1)..(861): Ortholog of  Ceres SEQ ID NO 15172783 as cited in SEQ ID NO 52143
  misc_feature (1)..(861): Ortholog of  Ceres SEQ ID NO 13599514 as cited in SEQ ID NO 0

SEQ ID NO: 117393 - protein, 168 aa, Arabidopsis thaliana; identical to SEQ ID NO: 20821
  peptide (1)..(168): Ceres Seq. ID no. 13618866

SEQ ID NO: 117394 - protein, 145 aa, Arabidopsis thaliana; identical to SEQ ID NO: 20822
  peptide (1)..(145): Ceres Seq. ID no. 13618867

SEQ ID NO: 117395 - DNA, 1301 bp, Arabidopsis thaliana; identical to SEQ ID NO: 106156
  misc_feature (1)..(1301): Ceres Seq. ID no. 13618876
  misc_feature (1)..(1301): Ortholog of  Ceres SEQ ID NO 15179926 as cited in SEQ ID NO 57010

SEQ ID NO: 117396 - protein, 341 aa, Arabidopsis thaliana; identical to SEQ ID NO: 106157
  peptide (1)..(341): Ceres Seq. ID no. 13618877

SEQ ID NO: 117397 - protein, 315 aa, Arabidopsis thaliana; identical to SEQ ID NO: 106158
  peptide (1)..(315): Ceres Seq. ID no. 13618878

SEQ ID NO: 117398 - protein, 252 aa, Arabidopsis thaliana; identical to SEQ ID NO: 106159
  peptide (1)..(252): Ceres Seq. ID no. 13618879

SEQ ID NO: 117399 - DNA, 645 bp, Arabidopsis thaliana; identical to SEQ ID NO: 106160
  misc_feature (1)..(645): Ceres Seq. ID no. 13618899
  misc_feature (1)..(645): Ortholog of  Ceres SEQ ID NO 13596185 as cited in SEQ ID NO 67997

SEQ ID NO: 117400 - protein, 167 aa, Arabidopsis thaliana; identical to SEQ ID NO: 28135
  peptide (1)..(167): Ceres Seq. ID no. 13618900

SEQ ID NO: 117401 - protein, 86 aa, Arabidopsis thaliana; identical to SEQ ID NO: 106162
  peptide (1)..(86): Ceres Seq. ID no. 13618901

SEQ ID NO: 117402 - DNA, 1407 bp, Arabidopsis thaliana; identical to SEQ ID NO: 106163
  misc_feature (1)..(1407): Ceres Seq. ID no. 13618906
  misc_feature (1)..(1407): Ortholog of  Ceres SEQ ID NO 12364737 as cited in SEQ ID NO 51089
  misc_feature (1)..(1407): Ortholog of  Ceres SEQ ID NO 12581561 as cited in SEQ ID NO 53617
  misc_feature (1)..(1407): Ortholog of  Ceres SEQ ID NO 14316263 as cited in SEQ ID NO 55294
  misc_feature (1)..(1407): Ortholog of  Ceres SEQ ID NO 15176751 as cited in SEQ ID NO 59719
  misc_feature (1)..(1407): Ortholog of  Ceres SEQ ID NO 13597380 as cited in SEQ ID NO 64054
  misc_feature (1)..(1407): Ortholog of  Ceres SEQ ID NO 12625474 as cited in SEQ ID NO 64169
  misc_feature (1)..(1407): Ortholog of  Ceres SEQ ID NO 13597502 as cited in SEQ ID NO 64681

SEQ ID NO: 117403 - protein, 367 aa, Arabidopsis thaliana; identical to SEQ ID NO: 25704
  peptide (1)..(367): Ceres Seq. ID no. 13618907

SEQ ID NO: 117404 - protein, 357 aa, Arabidopsis thaliana; identical to SEQ ID NO: 25705
  peptide (1)..(357): Ceres Seq. ID no. 13618908

SEQ ID NO: 117405 - protein, 346 aa, Arabidopsis thaliana; identical to SEQ ID NO: 25706
  peptide (1)..(346): Ceres Seq. ID no. 13618909

SEQ ID NO: 117406 - DNA, 1504 bp, Arabidopsis thaliana; identical to SEQ ID NO: 106167
  misc_feature (1)..(1504): Ceres Seq. ID no. 13618910
  misc_feature (1)..(1504): Ortholog of  Ceres SEQ ID NO 15177969 as cited in SEQ ID NO 58823

SEQ ID NO: 117407 - protein, 415 aa, Arabidopsis thaliana; identical to SEQ ID NO: 42455
  peptide (1)..(415): Ceres Seq. ID no. 13618911

SEQ ID NO: 117408 - protein, 329 aa, Arabidopsis thaliana; identical to SEQ ID NO: 42456
  peptide (1)..(329): Ceres Seq. ID no. 13618912

SEQ ID NO: 117409 - DNA, 885 bp, Arabidopsis thaliana; identical to SEQ ID NO: 106170
  misc_feature (1)..(885): Ceres Seq. ID no. 13618913
  misc_feature (1)..(885): Ortholog of  Ceres SEQ ID NO 12608127 as cited in SEQ ID NO 57579
  misc_feature (1)..(885): Ortholog of  Ceres SEQ ID NO 12634558 as cited in SEQ ID NO 0
  misc_feature (1)..(885): Ortholog of  Ceres SEQ ID NO 15180294 as cited in SEQ ID NO 0

SEQ ID NO: 117410 - protein, 256 aa, Arabidopsis thaliana; identical to SEQ ID NO: 39614
  peptide (1)..(256): Ceres Seq. ID no. 13618914

SEQ ID NO: 117411 - DNA, 1180 bp, Arabidopsis thaliana; identical to SEQ ID NO: 106172
  misc_feature (1)..(1180): Ceres Seq. ID no. 13618915
  misc_feature (1)..(1180): Ortholog of  Ceres SEQ ID NO 13654531 as cited in SEQ ID NO 68083

SEQ ID NO: 117412 - protein, 330 aa, Arabidopsis thaliana; identical to SEQ ID NO: 40152
  peptide (1)..(330): Ceres Seq. ID no. 13618916

SEQ ID NO: 117413 - protein, 317 aa, Arabidopsis thaliana; identical to SEQ ID NO: 40153
  peptide (1)..(317): Ceres Seq. ID no. 13618917

SEQ ID NO: 117414 - protein, 250 aa, Arabidopsis thaliana; identical to SEQ ID NO: 40154
  peptide (1)..(250): Ceres Seq. ID no. 13618918

SEQ ID NO: 117415 - DNA, 986 bp, Arabidopsis thaliana; identical to SEQ ID NO: 106176
  misc_feature (1)..(986): Ceres Seq. ID no. 13618919
  misc_feature (1)..(986): Ortholog of  Ceres SEQ ID NO 14307801 as cited in SEQ ID NO 59512
  misc_feature (1)..(986): Ortholog of  Ceres SEQ ID NO 14309110 as cited in SEQ ID NO 0
  misc_feature (1)..(986): Ortholog of  Ceres SEQ ID NO 15225903 as cited in SEQ ID NO 0

SEQ ID NO: 117416 - protein, 235 aa, Arabidopsis thaliana; identical to SEQ ID NO: 106177
  peptide (1)..(235): Ceres Seq. ID no. 13618920

SEQ ID NO: 117417 - protein, 131 aa, Arabidopsis thaliana; identical to SEQ ID NO: 35751
  peptide (1)..(131): Ceres Seq. ID no. 13618921

SEQ ID NO: 117418 - DNA, 729 bp, Arabidopsis thaliana; identical to SEQ ID NO: 106179
  misc_feature (1)..(729): Ceres Seq. ID no. 13618923
  misc_feature (1)..(729): Ortholog of  Ceres SEQ ID NO 15171239 as cited in SEQ ID NO 52298

SEQ ID NO: 117419 - protein, 193 aa, Arabidopsis thaliana; identical to SEQ ID NO: 40076
  peptide (1)..(193): Ceres Seq. ID no. 13618924

SEQ ID NO: 117420 - protein, 101 aa, Arabidopsis thaliana; identical to SEQ ID NO: 40077
  peptide (1)..(101): Ceres Seq. ID no. 13618925

SEQ ID NO: 117421 - DNA, 1069 bp, Arabidopsis thaliana; identical to SEQ ID NO: 106182
  misc_feature (1)..(1069): Ceres Seq. ID no. 13618930
  misc_feature (1)..(1069): Ortholog of  Ceres SEQ ID NO 13639109 as cited in SEQ ID NO 51131
  misc_feature (1)..(1069): Ortholog of  Ceres SEQ ID NO 13596346 as cited in SEQ ID NO 60879
  misc_feature (1)..(1069): Ortholog of  Ceres SEQ ID NO 15178104 as cited in SEQ ID NO 0

SEQ ID NO: 117422 - protein, 294 aa, Arabidopsis thaliana; identical to SEQ ID NO: 106183
  peptide (1)..(294): Ceres Seq. ID no. 13618931

SEQ ID NO: 117423 - protein, 273 aa, Arabidopsis thaliana; identical to SEQ ID NO: 30157
  peptide (1)..(273): Ceres Seq. ID no. 13618932

SEQ ID NO: 117424 - protein, 262 aa, Arabidopsis thaliana; identical to SEQ ID NO: 30158
  peptide (1)..(262): Ceres Seq. ID no. 13618933

SEQ ID NO: 117425 - DNA, 1522 bp, Arabidopsis thaliana; identical to SEQ ID NO: 106186
  misc_feature (1)..(1522): Ceres Seq. ID no. 13618941
  misc_feature (1)..(1522): Ortholog of  Ceres SEQ ID NO 14315279 as cited in SEQ ID NO 52534
  misc_feature (1)..(1522): Ortholog of  Ceres SEQ ID NO 12583190 as cited in SEQ ID NO 56386

SEQ ID NO: 117426 - protein, 477 aa, Arabidopsis thaliana; identical to SEQ ID NO: 106187
  peptide (1)..(477): Ceres Seq. ID no. 13618942

SEQ ID NO: 117427 - protein, 471 aa, Arabidopsis thaliana; identical to SEQ ID NO: 106188
  peptide (1)..(471): Ceres Seq. ID no. 13618943

SEQ ID NO: 117428 - protein, 444 aa, Arabidopsis thaliana; identical to SEQ ID NO: 106189
  peptide (1)..(444): Ceres Seq. ID no. 13618944

SEQ ID NO: 117429 - DNA, 1066 bp, Arabidopsis thaliana; identical to SEQ ID NO: 106190
  misc_feature (1)..(1066): Ceres Seq. ID no. 13618949
  misc_feature (1)..(1066): Ortholog of  Ceres SEQ ID NO 15174082 as cited in SEQ ID NO 61896
  misc_feature (1)..(1066): Ortholog of  Ceres SEQ ID NO 13655598 as cited in SEQ ID NO 64077
  misc_feature (1)..(1066): Ortholog of  Ceres SEQ ID NO 15179351 as cited in SEQ ID NO 0
  misc_feature (1)..(1066): Ortholog of  Ceres SEQ ID NO 15180408 as cited in SEQ ID NO 0

SEQ ID NO: 117430 - protein, 253 aa, Arabidopsis thaliana; identical to SEQ ID NO: 106191
  peptide (1)..(253): Ceres Seq. ID no. 13618950

SEQ ID NO: 117431 - DNA, 1520 bp, Arabidopsis thaliana; identical to SEQ ID NO: 106192
  misc_feature (1)..(1520): Ceres Seq. ID no. 13618954
  misc_feature (1)..(1520): Ortholog of  Ceres SEQ ID NO 13654989 as cited in SEQ ID NO 63117
  misc_feature (1)..(1520): Ortholog of  Ceres SEQ ID NO 13584744 as cited in SEQ ID NO 69137

SEQ ID NO: 117432 - protein, 401 aa, Arabidopsis thaliana; identical to SEQ ID NO: 106193
  peptide (1)..(401): Ceres Seq. ID no. 13618955

SEQ ID NO: 117433 - protein, 380 aa, Arabidopsis thaliana; identical to SEQ ID NO: 106194
  peptide (1)..(380): Ceres Seq. ID no. 13618956

SEQ ID NO: 117434 - protein, 320 aa, Arabidopsis thaliana; identical to SEQ ID NO: 106195
  peptide (1)..(320): Ceres Seq. ID no. 13618957

SEQ ID NO: 117435 - DNA, 1440 bp, Arabidopsis thaliana; identical to SEQ ID NO: 106196
  misc_feature (1)..(1440): Ceres Seq. ID no. 13618980
  misc_feature (1)..(1440): Ortholog of  Ceres SEQ ID NO 13581327 as cited in SEQ ID NO 51165
  misc_feature (1)..(1440): Ortholog of  Ceres SEQ ID NO 12610002 as cited in SEQ ID NO 55823
  misc_feature (1)..(1440): Ortholog of  Ceres SEQ ID NO 14308310 as cited in SEQ ID NO 58573
  misc_feature (1)..(1440): Ortholog of  Ceres SEQ ID NO 14308795 as cited in SEQ ID NO 59140
  misc_feature (1)..(1440): Ortholog of  Ceres SEQ ID NO 14313354 as cited in SEQ ID NO 61520
  misc_feature (1)..(1440): Ortholog of  Ceres SEQ ID NO 13596744 as cited in SEQ ID NO 62765

SEQ ID NO: 117436 - protein, 296 aa, Arabidopsis thaliana; identical to SEQ ID NO: 30087
  peptide (1)..(296): Ceres Seq. ID no. 13618981

SEQ ID NO: 117437 - protein, 261 aa, Arabidopsis thaliana; identical to SEQ ID NO: 30088
  peptide (1)..(261): Ceres Seq. ID no. 13618982

SEQ ID NO: 117438 - protein, 256 aa, Arabidopsis thaliana; identical to SEQ ID NO: 30089
  peptide (1)..(256): Ceres Seq. ID no. 13618983

SEQ ID NO: 117439 - DNA, 1414 bp, Arabidopsis thaliana; identical to SEQ ID NO: 106200
  misc_feature (1)..(1414): Ceres Seq. ID no. 13618992
  misc_feature (1)..(1414): Ortholog of  Ceres SEQ ID NO 13595688 as cited in SEQ ID NO 54342
  misc_feature (1)..(1414): Ortholog of  Ceres SEQ ID NO 13595240 as cited in SEQ ID NO 56316
  misc_feature (1)..(1414): Ortholog of  Ceres SEQ ID NO 15168425 as cited in SEQ ID NO 57370

SEQ ID NO: 117440 - protein, 307 aa, Arabidopsis thaliana; identical to SEQ ID NO: 106201
  peptide (1)..(307): Ceres Seq. ID no. 13618993

SEQ ID NO: 117441 - protein, 199 aa, Arabidopsis thaliana; identical to SEQ ID NO: 106202
  peptide (1)..(199): Ceres Seq. ID no. 13618994

SEQ ID NO: 117442 - protein, 178 aa, Arabidopsis thaliana; identical to SEQ ID NO: 37471
  peptide (1)..(178): Ceres Seq. ID no. 13618995

SEQ ID NO: 117443 - DNA, 1182 bp, Arabidopsis thaliana; identical to SEQ ID NO: 106204
  misc_feature (1)..(1182): Ceres Seq. ID no. 13618996
  misc_feature (1)..(1182): Ortholog of  Ceres SEQ ID NO 13599444 as cited in SEQ ID NO 517
  misc_feature (1)..(1182): Ortholog of  Ceres SEQ ID NO 15169431 as cited in SEQ ID NO 60449
  misc_feature (1)..(1182): Ortholog of  Ceres SEQ ID NO 12615444 as cited in SEQ ID NO 62593
  misc_feature (1)..(1182): Ortholog of  Ceres SEQ ID NO 14302204 as cited in SEQ ID NO 63150

SEQ ID NO: 117444 - protein, 294 aa, Arabidopsis thaliana; identical to SEQ ID NO: 106205
  peptide (1)..(294): Ceres Seq. ID no. 13618997

SEQ ID NO: 117445 - protein, 279 aa, Arabidopsis thaliana; identical to SEQ ID NO: 106206
  peptide (1)..(279): Ceres Seq. ID no. 13618998

SEQ ID NO: 117446 - protein, 188 aa, Arabidopsis thaliana; identical to SEQ ID NO: 106207
  peptide (1)..(188): Ceres Seq. ID no. 13618999

SEQ ID NO: 117447 - DNA, 1175 bp, Arabidopsis thaliana; identical to SEQ ID NO: 106208
  misc_feature (1)..(1175): Ceres Seq. ID no. 13619003
  misc_feature (1)..(1175): Ortholog of  Ceres SEQ ID NO 13638643 as cited in SEQ ID NO 52149

SEQ ID NO: 117448 - protein, 279 aa, Arabidopsis thaliana; identical to SEQ ID NO: 29511
  peptide (1)..(279): Ceres Seq. ID no. 13619004

SEQ ID NO: 117449 - protein, 200 aa, Arabidopsis thaliana; identical to SEQ ID NO: 29512
  peptide (1)..(200): Ceres Seq. ID no. 13619005

SEQ ID NO: 117450 - protein, 188 aa, Arabidopsis thaliana; identical to SEQ ID NO: 106211
  peptide (1)..(188): Ceres Seq. ID no. 13619006

SEQ ID NO: 117451 - DNA, 1123 bp, Arabidopsis thaliana; identical to SEQ ID NO: 106212
  misc_feature (1)..(1123): Ceres Seq. ID no. 13619007
  misc_feature (1)..(1123): Ortholog of  Ceres SEQ ID NO 15179499 as cited in SEQ ID NO 0

SEQ ID NO: 117452 - protein, 304 aa, Arabidopsis thaliana; identical to SEQ ID NO: 106213
  peptide (1)..(304): Ceres Seq. ID no. 13619008

SEQ ID NO: 117453 - protein, 273 aa, Arabidopsis thaliana; identical to SEQ ID NO: 35843
  peptide (1)..(273): Ceres Seq. ID no. 13619009

SEQ ID NO: 117454 - protein, 250 aa, Arabidopsis thaliana; identical to SEQ ID NO: 35844
  peptide (1)..(250): Ceres Seq. ID no. 13619010

SEQ ID NO: 117455 - DNA, 1770 bp, Arabidopsis thaliana; identical to SEQ ID NO: 106216
  misc_feature (1)..(1770): Ceres Seq. ID no. 13619011
  misc_feature (1)..(1770): Ortholog of  Ceres SEQ ID NO 14303423 as cited in SEQ ID NO 54243
  misc_feature (1)..(1770): Ortholog of  Ceres SEQ ID NO 12611314 as cited in SEQ ID NO 56535
  misc_feature (1)..(1770): Ortholog of  Ceres SEQ ID NO 13661438 as cited in SEQ ID NO 61414

SEQ ID NO: 117456 - protein, 398 aa, Arabidopsis thaliana; identical to SEQ ID NO: 106217
  peptide (1)..(398): Ceres Seq. ID no. 13619012

SEQ ID NO: 117457 - protein, 392 aa, Arabidopsis thaliana; identical to SEQ ID NO: 106218
  peptide (1)..(392): Ceres Seq. ID no. 13619013

SEQ ID NO: 117458 - protein, 391 aa, Arabidopsis thaliana; identical to SEQ ID NO: 106219
  peptide (1)..(391): Ceres Seq. ID no. 13619014

SEQ ID NO: 117459 - DNA, 1351 bp, Arabidopsis thaliana; identical to SEQ ID NO: 106220
  misc_feature (1)..(1351): Ceres Seq. ID no. 13619015
  misc_feature (1)..(1351): Ortholog of  Ceres SEQ ID NO 13655244 as cited in SEQ ID NO 62716

SEQ ID NO: 117460 - protein, 371 aa, Arabidopsis thaliana; identical to SEQ ID NO: 106221
  peptide (1)..(371): Ceres Seq. ID no. 13619016

SEQ ID NO: 117461 - protein, 340 aa, Arabidopsis thaliana; identical to SEQ ID NO: 25247
  peptide (1)..(340): Ceres Seq. ID no. 13619017

SEQ ID NO: 117462 - protein, 314 aa, Arabidopsis thaliana; identical to SEQ ID NO: 25248
  peptide (1)..(314): Ceres Seq. ID no. 13619018

SEQ ID NO: 117463 - DNA, 1007 bp, Arabidopsis thaliana; identical to SEQ ID NO: 106224
  misc_feature (1)..(1007): Ceres Seq. ID no. 13619022
  misc_feature (1)..(1007): Ortholog of  Ceres SEQ ID NO 14313599 as cited in SEQ ID NO 54989
  misc_feature (1)..(1007): Ortholog of  Ceres SEQ ID NO 15176204 as cited in SEQ ID NO 55608
  misc_feature (1)..(1007): Ortholog of  Ceres SEQ ID NO 15225111 as cited in SEQ ID NO 58444
  misc_feature (1)..(1007): Ortholog of  Ceres SEQ ID NO 14313064 as cited in SEQ ID NO 59543
  misc_feature (1)..(1007): Ortholog of  Ceres SEQ ID NO 13661001 as cited in SEQ ID NO 67531
  misc_feature (1)..(1007): Ortholog of  Ceres SEQ ID NO 15178920 as cited in SEQ ID NO 0

SEQ ID NO: 117464 - protein, 226 aa, Arabidopsis thaliana; identical to SEQ ID NO: 106225
  peptide (1)..(226): Ceres Seq. ID no. 13619023

SEQ ID NO: 117465 - protein, 200 aa, Arabidopsis thaliana; identical to SEQ ID NO: 106226
  peptide (1)..(200): Ceres Seq. ID no. 13619024

SEQ ID NO: 117466 - protein, 140 aa, Arabidopsis thaliana; identical to SEQ ID NO: 106227
  peptide (1)..(140): Ceres Seq. ID no. 13619025

SEQ ID NO: 117467 - DNA, 808 bp, Arabidopsis thaliana; identical to SEQ ID NO: 106228
  misc_feature (1)..(808): Ceres Seq. ID no. 13619026
  misc_feature (1)..(808): Ortholog of  Ceres SEQ ID NO 12610334 as cited in SEQ ID NO 56235
  misc_feature (1)..(808): Ortholog of  Ceres SEQ ID NO 13654825 as cited in SEQ ID NO 62409

SEQ ID NO: 117468 - protein, 187 aa, Arabidopsis thaliana; identical to SEQ ID NO: 106229
  peptide (1)..(187): Ceres Seq. ID no. 13619027

SEQ ID NO: 117469 - protein, 93 aa, Arabidopsis thaliana; identical to SEQ ID NO: 106230
  peptide (1)..(93): Ceres Seq. ID no. 13619028

SEQ ID NO: 117470 - DNA, 861 bp, Arabidopsis thaliana; identical to SEQ ID NO: 106231
  misc_feature (1)..(861): Ceres Seq. ID no. 13619034
  misc_feature (1)..(861): Ortholog of  Ceres SEQ ID NO 15170072 as cited in SEQ ID NO 55533
  misc_feature (1)..(861): Ortholog of  Ceres SEQ ID NO 15173959 as cited in SEQ ID NO 63398
  misc_feature (1)..(861): Ortholog of  Ceres SEQ ID NO 13663564 as cited in SEQ ID NO 66903

SEQ ID NO: 117471 - protein, 188 aa, Arabidopsis thaliana; identical to SEQ ID NO: 29977
  peptide (1)..(188): Ceres Seq. ID no. 13619035

SEQ ID NO: 117472 - protein, 146 aa, Arabidopsis thaliana; identical to SEQ ID NO: 29978
  peptide (1)..(146): Ceres Seq. ID no. 13619036

SEQ ID NO: 117473 - protein, 109 aa, Arabidopsis thaliana; identical to SEQ ID NO: 29979
  peptide (1)..(109): Ceres Seq. ID no. 13619037

SEQ ID NO: 117474 - DNA, 1369 bp, Arabidopsis thaliana; identical to SEQ ID NO: 106235
  misc_feature (1)..(1369): Ceres Seq. ID no. 13619038
  misc_feature (1)..(1369): Ortholog of  Ceres SEQ ID NO 14310687 as cited in SEQ ID NO 52933

SEQ ID NO: 117475 - protein, 289 aa, Arabidopsis thaliana; identical to SEQ ID NO: 40578
  peptide (1)..(289): Ceres Seq. ID no. 13619039

SEQ ID NO: 117476 - protein, 160 aa, Arabidopsis thaliana; identical to SEQ ID NO: 40579
  peptide (1)..(160): Ceres Seq. ID no. 13619040

SEQ ID NO: 117477 - DNA, 1447 bp, Arabidopsis thaliana; identical to SEQ ID NO: 106238
  misc_feature (1)..(1447): Ceres Seq. ID no. 13619053
  misc_feature (1)..(1447): Ortholog of  Ceres SEQ ID NO 15172321 as cited in SEQ ID NO 55415

SEQ ID NO: 117478 - protein, 369 aa, Arabidopsis thaliana; identical to SEQ ID NO: 24309
  peptide (1)..(369): Ceres Seq. ID no. 13619054

SEQ ID NO: 117479 - protein, 365 aa, Arabidopsis thaliana; identical to SEQ ID NO: 24310
  peptide (1)..(365): Ceres Seq. ID no. 13619055

SEQ ID NO: 117480 - protein, 230 aa, Arabidopsis thaliana; identical to SEQ ID NO: 24311
  peptide (1)..(230): Ceres Seq. ID no. 13619056

SEQ ID NO: 117481 - DNA, 1757 bp, Arabidopsis thaliana; identical to SEQ ID NO: 106242
  misc_feature (1)..(1757): Ceres Seq. ID no. 13619060
  misc_feature (1)..(1757): Ortholog of  Ceres SEQ ID NO 15176262 as cited in SEQ ID NO 54751
  misc_feature (1)..(1757): Ortholog of  Ceres SEQ ID NO 13656177 as cited in SEQ ID NO 64997

SEQ ID NO: 117482 - protein, 523 aa, Arabidopsis thaliana; identical to SEQ ID NO: 106243
  peptide (1)..(523): Ceres Seq. ID no. 13619061

SEQ ID NO: 117483 - protein, 496 aa, Arabidopsis thaliana; identical to SEQ ID NO: 25901
  peptide (1)..(496): Ceres Seq. ID no. 13619062

SEQ ID NO: 117484 - protein, 394 aa, Arabidopsis thaliana; identical to SEQ ID NO: 25902
  peptide (1)..(394): Ceres Seq. ID no. 13619063

SEQ ID NO: 117485 - DNA, 1347 bp, Arabidopsis thaliana; identical to SEQ ID NO: 106246
  misc_feature (1)..(1347): Ceres Seq. ID no. 13619068
  misc_feature (1)..(1347): Ortholog of  Ceres SEQ ID NO 15170760 as cited in SEQ ID NO 52747
  misc_feature (1)..(1347): Ortholog of  Ceres SEQ ID NO 14314335 as cited in SEQ ID NO 57305
  misc_feature (1)..(1347): Ortholog of  Ceres SEQ ID NO 15177588 as cited in SEQ ID NO 60367

SEQ ID NO: 117486 - protein, 287 aa, Arabidopsis thaliana; identical to SEQ ID NO: 24770
  peptide (1)..(287): Ceres Seq. ID no. 13619069

SEQ ID NO: 117487 - protein, 198 aa, Arabidopsis thaliana; identical to SEQ ID NO: 24771
  peptide (1)..(198): Ceres Seq. ID no. 13619070

SEQ ID NO: 117488 - DNA, 1665 bp, Arabidopsis thaliana; identical to SEQ ID NO: 106249
  misc_feature (1)..(1665): Ceres Seq. ID no. 13619071
  misc_feature (1)..(1665): Ortholog of  Ceres SEQ ID NO 15176911 as cited in SEQ ID NO 54868
  misc_feature (1)..(1665): Ortholog of  Ceres SEQ ID NO 13596433 as cited in SEQ ID NO 68721
  misc_feature (1)..(1665): Ortholog of  Ceres SEQ ID NO 13599169 as cited in SEQ ID NO 0

SEQ ID NO: 117489 - protein, 470 aa, Arabidopsis thaliana; identical to SEQ ID NO: 106250
  peptide (1)..(470): Ceres Seq. ID no. 13619072

SEQ ID NO: 117490 - protein, 435 aa, Arabidopsis thaliana; identical to SEQ ID NO: 106251
  peptide (1)..(435): Ceres Seq. ID no. 13619073

SEQ ID NO: 117491 - protein, 428 aa, Arabidopsis thaliana; identical to SEQ ID NO: 106252
  peptide (1)..(428): Ceres Seq. ID no. 13619074

SEQ ID NO: 117492 - DNA, 877 bp, Arabidopsis thaliana; identical to SEQ ID NO: 106253
  misc_feature (1)..(877): Ceres Seq. ID no. 13619083
  misc_feature (1)..(877): Ortholog of  Ceres SEQ ID NO 15168856 as cited in SEQ ID NO 56354
  misc_feature (1)..(877): Ortholog of  Ceres SEQ ID NO 13583591 as cited in SEQ ID NO 63084

SEQ ID NO: 117493 - protein, 154 aa, Arabidopsis thaliana; identical to SEQ ID NO: 42421
  peptide (1)..(154): Ceres Seq. ID no. 13619084

SEQ ID NO: 117494 - protein, 124 aa, Arabidopsis thaliana; identical to SEQ ID NO: 42422
  peptide (1)..(124): Ceres Seq. ID no. 13619085

SEQ ID NO: 117495 - protein, 105 aa, Arabidopsis thaliana; identical to SEQ ID NO: 42423
  peptide (1)..(105): Ceres Seq. ID no. 13619086

SEQ ID NO: 117496 - DNA, 747 bp, Arabidopsis thaliana; identical to SEQ ID NO: 106257
  misc_feature (1)..(747): Ceres Seq. ID no. 13619087
  misc_feature (1)..(747): Ortholog of  Ceres SEQ ID NO 13595067 as cited in SEQ ID NO 55857
  misc_feature (1)..(747): Ortholog of  Ceres SEQ ID NO 12635516 as cited in SEQ ID NO 0
  misc_feature (1)..(747): Ortholog of  Ceres SEQ ID NO 15179376 as cited in SEQ ID NO 0

SEQ ID NO: 117497 - protein, 183 aa, Arabidopsis thaliana; identical to SEQ ID NO: 106258
  peptide (1)..(183): Ceres Seq. ID no. 13619088

SEQ ID NO: 117498 - protein, 160 aa, Arabidopsis thaliana; identical to SEQ ID NO: 35431
  peptide (1)..(160): Ceres Seq. ID no. 13619089

SEQ ID NO: 117499 - protein, 150 aa, Arabidopsis thaliana; identical to SEQ ID NO: 35432
  peptide (1)..(150): Ceres Seq. ID no. 13619090

SEQ ID NO: 117500 - DNA, 1811 bp, Arabidopsis thaliana; identical to SEQ ID NO: 106261
  misc_feature (1)..(1811): Ceres Seq. ID no. 13619095
  misc_feature (1)..(1811): Ortholog of  Ceres SEQ ID NO 14313228 as cited in SEQ ID NO 67057

SEQ ID NO: 117501 - protein, 490 aa, Arabidopsis thaliana; identical to SEQ ID NO: 42727
  peptide (1)..(490): Ceres Seq. ID no. 13619096

SEQ ID NO: 117502 - protein, 359 aa, Arabidopsis thaliana; identical to SEQ ID NO: 42728
  peptide (1)..(359): Ceres Seq. ID no. 13619097

SEQ ID NO: 117503 - protein, 342 aa, Arabidopsis thaliana; identical to SEQ ID NO: 42729
  peptide (1)..(342): Ceres Seq. ID no. 13619098

SEQ ID NO: 117504 - DNA, 1169 bp, Arabidopsis thaliana; identical to SEQ ID NO: 106265
  misc_feature (1)..(1169): Ceres Seq. ID no. 13619099
  misc_feature (1)..(1169): Ortholog of  Ceres SEQ ID NO 12616162 as cited in SEQ ID NO 63260

SEQ ID NO: 117505 - protein, 323 aa, Arabidopsis thaliana; identical to SEQ ID NO: 27465
  peptide (1)..(323): Ceres Seq. ID no. 13619100

SEQ ID NO: 117506 - protein, 233 aa, Arabidopsis thaliana; identical to SEQ ID NO: 27466
  peptide (1)..(233): Ceres Seq. ID no. 13619101

SEQ ID NO: 117507 - protein, 173 aa, Arabidopsis thaliana; identical to SEQ ID NO: 27467
  peptide (1)..(173): Ceres Seq. ID no. 13619102

SEQ ID NO: 117508 - DNA, 1204 bp, Arabidopsis thaliana; identical to SEQ ID NO: 106269
  misc_feature (1)..(1204): Ceres Seq. ID no. 13619103
  misc_feature (1)..(1204): Ortholog of  Ceres SEQ ID NO 13532807 as cited in SEQ ID NO 53012
  misc_feature (1)..(1204): Ortholog of  Ceres SEQ ID NO 15176375 as cited in SEQ ID NO 53238
  misc_feature (1)..(1204): Ortholog of  Ceres SEQ ID NO 14316507 as cited in SEQ ID NO 57397
  misc_feature (1)..(1204): Ortholog of  Ceres SEQ ID NO 13663060 as cited in SEQ ID NO 60964
  misc_feature (1)..(1204): Ortholog of  Ceres SEQ ID NO 13598532 as cited in SEQ ID NO 65204
  misc_feature (1)..(1204): Ortholog of  Ceres SEQ ID NO 13656849 as cited in SEQ ID NO 65764
  misc_feature (1)..(1204): Ortholog of  Ceres SEQ ID NO 13656501 as cited in SEQ ID NO 69206

SEQ ID NO: 117509 - protein, 309 aa, Arabidopsis thaliana; identical to SEQ ID NO: 106270
  peptide (1)..(309): Ceres Seq. ID no. 13619104

SEQ ID NO: 117510 - protein, 288 aa, Arabidopsis thaliana; identical to SEQ ID NO: 106271
  peptide (1)..(288): Ceres Seq. ID no. 13619105

SEQ ID NO: 117511 - protein, 271 aa, Arabidopsis thaliana; identical to SEQ ID NO: 106272
  peptide (1)..(271): Ceres Seq. ID no. 13619106

SEQ ID NO: 117512 - DNA, 789 bp, Arabidopsis thaliana; identical to SEQ ID NO: 106273
  misc_feature (1)..(789): Ceres Seq. ID no. 13619111
  misc_feature (1)..(789): Ortholog of  Ceres SEQ ID NO 13594241 as cited in SEQ ID NO 57394

SEQ ID NO: 117513 - protein, 204 aa, Arabidopsis thaliana; identical to SEQ ID NO: 106274
  peptide (1)..(204): Ceres Seq. ID no. 13619112

SEQ ID NO: 117514 - protein, 189 aa, Arabidopsis thaliana; identical to SEQ ID NO: 106275
  peptide (1)..(189): Ceres Seq. ID no. 13619113

SEQ ID NO: 117515 - protein, 184 aa, Arabidopsis thaliana; identical to SEQ ID NO: 106276
  peptide (1)..(184): Ceres Seq. ID no. 13619114

SEQ ID NO: 117516 - DNA, 1179 bp, Arabidopsis thaliana; identical to SEQ ID NO: 106277
  misc_feature (1)..(1179): Ceres Seq. ID no. 13619119
  misc_feature (1)..(1179): Ortholog of  Ceres SEQ ID NO 13598741 as cited in SEQ ID NO 62749
  misc_feature (1)..(1179): Ortholog of  Ceres SEQ ID NO 12587535 as cited in SEQ ID NO 64020
  misc_feature (1)..(1179): Ortholog of  Ceres SEQ ID NO 12586366 as cited in SEQ ID NO 68983

SEQ ID NO: 117517 - protein, 370 aa, Arabidopsis thaliana; identical to SEQ ID NO: 106278
  peptide (1)..(370): Ceres Seq. ID no. 13619120

SEQ ID NO: 117518 - protein, 323 aa, Arabidopsis thaliana; identical to SEQ ID NO: 106279
  peptide (1)..(323): Ceres Seq. ID no. 13619121

SEQ ID NO: 117519 - DNA, 1674 bp, Arabidopsis thaliana; identical to SEQ ID NO: 106280
  misc_feature (1)..(1674): Ceres Seq. ID no. 13619133
  misc_feature (1)..(1674): Ortholog of  Ceres SEQ ID NO 13654928 as cited in SEQ ID NO 62546

SEQ ID NO: 117520 - protein, 375 aa, Arabidopsis thaliana; identical to SEQ ID NO: 106281
  peptide (1)..(375): Ceres Seq. ID no. 13619134

SEQ ID NO: 117521 - protein, 373 aa, Arabidopsis thaliana; identical to SEQ ID NO: 106282
  peptide (1)..(373): Ceres Seq. ID no. 13619135

SEQ ID NO: 117522 - protein, 343 aa, Arabidopsis thaliana; identical to SEQ ID NO: 106283
  peptide (1)..(343): Ceres Seq. ID no. 13619136

SEQ ID NO: 117523 - DNA, 944 bp, Arabidopsis thaliana; identical to SEQ ID NO: 106284
  misc_feature (1)..(944): Ceres Seq. ID no. 13619141
  misc_feature (1)..(944): Ortholog of  Ceres SEQ ID NO 13595187 as cited in SEQ ID NO 56052
  misc_feature (1)..(944): Ortholog of  Ceres SEQ ID NO 13662053 as cited in SEQ ID NO 61547
  misc_feature (1)..(944): Ortholog of  Ceres SEQ ID NO 13624283 as cited in SEQ ID NO 0

SEQ ID NO: 117524 - protein, 177 aa, Arabidopsis thaliana; identical to SEQ ID NO: 106285
  peptide (1)..(177): Ceres Seq. ID no. 13619142

SEQ ID NO: 117525 - protein, 166 aa, Arabidopsis thaliana; identical to SEQ ID NO: 106286
  peptide (1)..(166): Ceres Seq. ID no. 13619143

SEQ ID NO: 117526 - protein, 128 aa, Arabidopsis thaliana; identical to SEQ ID NO: 106287
  peptide (1)..(128): Ceres Seq. ID no. 13619144

SEQ ID NO: 117527 - DNA, 966 bp, Arabidopsis thaliana; identical to SEQ ID NO: 106288
  misc_feature (1)..(966): Ceres Seq. ID no. 13619156
  misc_feature (1)..(966): Ortholog of  Ceres SEQ ID NO 15176306 as cited in SEQ ID NO 52784
  misc_feature (1)..(966): Ortholog of  Ceres SEQ ID NO 13582624 as cited in SEQ ID NO 56287
  misc_feature (1)..(966): Ortholog of  Ceres SEQ ID NO 13597264 as cited in SEQ ID NO 63897
  misc_feature (1)..(966): Ortholog of  Ceres SEQ ID NO 13598570 as cited in SEQ ID NO 65434
  misc_feature (1)..(966): Ortholog of  Ceres SEQ ID NO 13656452 as cited in SEQ ID NO 65745
  misc_feature (1)..(966): Ortholog of  Ceres SEQ ID NO 13596238 as cited in SEQ ID NO 68834

SEQ ID NO: 117528 - protein, 270 aa, Arabidopsis thaliana; identical to SEQ ID NO: 106289
  peptide (1)..(270): Ceres Seq. ID no. 13619157

SEQ ID NO: 117529 - protein, 265 aa, Arabidopsis thaliana; identical to SEQ ID NO: 106290
  peptide (1)..(265): Ceres Seq. ID no. 13619158

SEQ ID NO: 117530 - protein, 144 aa, Arabidopsis thaliana; identical to SEQ ID NO: 106291
  peptide (1)..(144): Ceres Seq. ID no. 13619159

SEQ ID NO: 117531 - DNA, 739 bp, Arabidopsis thaliana; identical to SEQ ID NO: 106292
  misc_feature (1)..(739): Ceres Seq. ID no. 13619172
  misc_feature (1)..(739): Ortholog of  Ceres SEQ ID NO 14307480 as cited in SEQ ID NO 54235

SEQ ID NO: 117532 - protein, 174 aa, Arabidopsis thaliana; identical to SEQ ID NO: 106293
  peptide (1)..(174): Ceres Seq. ID no. 13619173

SEQ ID NO: 117533 - protein, 146 aa, Arabidopsis thaliana; identical to SEQ ID NO: 106294
  peptide (1)..(146): Ceres Seq. ID no. 13619174

SEQ ID NO: 117534 - protein, 142 aa, Arabidopsis thaliana; identical to SEQ ID NO: 106295
  peptide (1)..(142): Ceres Seq. ID no. 13619175

SEQ ID NO: 117535 - DNA, 5073 bp, Arabidopsis thaliana; identical to SEQ ID NO: 106296
  misc_feature (1)..(5073): Ceres Seq. ID no. 13619180
  misc_feature (1)..(5073): Ortholog of  Ceres SEQ ID NO 13660487 as cited in SEQ ID NO 60849

SEQ ID NO: 117536 - protein, 1514 aa, Arabidopsis thaliana; identical to SEQ ID NO: 39531
  peptide (1)..(1514): Ceres Seq. ID no. 13619181

SEQ ID NO: 117537 - protein, 1355 aa, Arabidopsis thaliana; identical to SEQ ID NO: 39532
  peptide (1)..(1355): Ceres Seq. ID no. 13619182

SEQ ID NO: 117538 - protein, 1215 aa, Arabidopsis thaliana; identical to SEQ ID NO: 39533
  peptide (1)..(1215): Ceres Seq. ID no. 13619183

SEQ ID NO: 117539 - DNA, 1351 bp, Arabidopsis thaliana; identical to SEQ ID NO: 106300
  misc_feature (1)..(1351): Ceres Seq. ID no. 13619184
  misc_feature (1)..(1351): Ortholog of  Ceres SEQ ID NO 13590307 as cited in SEQ ID NO 67154

SEQ ID NO: 117540 - protein, 332 aa, Arabidopsis thaliana; identical to SEQ ID NO: 25356
  peptide (1)..(332): Ceres Seq. ID no. 13619185

SEQ ID NO: 117541 - protein, 309 aa, Arabidopsis thaliana; identical to SEQ ID NO: 25357
  peptide (1)..(309): Ceres Seq. ID no. 13619186

SEQ ID NO: 117542 - protein, 303 aa, Arabidopsis thaliana; identical to SEQ ID NO: 25358
  peptide (1)..(303): Ceres Seq. ID no. 13619187

SEQ ID NO: 117543 - DNA, 717 bp, Arabidopsis thaliana; identical to SEQ ID NO: 106304
  misc_feature (1)..(717): Ceres Seq. ID no. 13619188
  misc_feature (1)..(717): Ortholog of  Ceres SEQ ID NO 12634455 as cited in SEQ ID NO 0

SEQ ID NO: 117544 - protein, 188 aa, Arabidopsis thaliana; identical to SEQ ID NO: 28057
  peptide (1)..(188): Ceres Seq. ID no. 13619189

SEQ ID NO: 117545 - protein, 155 aa, Arabidopsis thaliana; identical to SEQ ID NO: 28058
  peptide (1)..(155): Ceres Seq. ID no. 13619190

SEQ ID NO: 117546 - protein, 134 aa, Arabidopsis thaliana; identical to SEQ ID NO: 28059
  peptide (1)..(134): Ceres Seq. ID no. 13619191

SEQ ID NO: 117547 - DNA, 1112 bp, Arabidopsis thaliana; identical to SEQ ID NO: 106308
  misc_feature (1)..(1112): Ceres Seq. ID no. 13619200
  misc_feature (1)..(1112): Ortholog of  Ceres SEQ ID NO 15224625 as cited in SEQ ID NO 1390
  misc_feature (1)..(1112): Ortholog of  Ceres SEQ ID NO 13581868 as cited in SEQ ID NO 52227
  misc_feature (1)..(1112): Ortholog of  Ceres SEQ ID NO 14306339 as cited in SEQ ID NO 0

SEQ ID NO: 117548 - protein, 287 aa, Arabidopsis thaliana; identical to SEQ ID NO: 106309
  peptide (1)..(287): Ceres Seq. ID no. 13619201

SEQ ID NO: 117549 - protein, 253 aa, Arabidopsis thaliana; identical to SEQ ID NO: 106310
  peptide (1)..(253): Ceres Seq. ID no. 13619202

SEQ ID NO: 117550 - protein, 225 aa, Arabidopsis thaliana; identical to SEQ ID NO: 106311
  peptide (1)..(225): Ceres Seq. ID no. 13619203

SEQ ID NO: 117551 - DNA, 1561 bp, Arabidopsis thaliana; identical to SEQ ID NO: 106312
  misc_feature (1)..(1561): Ceres Seq. ID no. 13619208
  misc_feature (1)..(1561): Ortholog of  Ceres SEQ ID NO 13637685 as cited in SEQ ID NO 53978
  misc_feature (1)..(1561): Ortholog of  Ceres SEQ ID NO 14315989 as cited in SEQ ID NO 57571

SEQ ID NO: 117552 - protein, 320 aa, Arabidopsis thaliana; identical to SEQ ID NO: 106313
  peptide (1)..(320): Ceres Seq. ID no. 13619209

SEQ ID NO: 117553 - protein, 170 aa, Arabidopsis thaliana; identical to SEQ ID NO: 106314
  peptide (1)..(170): Ceres Seq. ID no. 13619210

SEQ ID NO: 117554 - DNA, 2655 bp, Arabidopsis thaliana; identical to SEQ ID NO: 106315
  misc_feature (1)..(2655): Ceres Seq. ID no. 13619219
  misc_feature (1)..(2655): Ortholog of  Ceres SEQ ID NO 13600595 as cited in SEQ ID NO 629

SEQ ID NO: 117555 - protein, 832 aa, Arabidopsis thaliana; identical to SEQ ID NO: 106316
  peptide (1)..(832): Ceres Seq. ID no. 13619220

SEQ ID NO: 117556 - protein, 775 aa, Arabidopsis thaliana; identical to SEQ ID NO: 84187
  peptide (1)..(775): Ceres Seq. ID no. 13619221

SEQ ID NO: 117557 - protein, 671 aa, Arabidopsis thaliana; identical to SEQ ID NO: 106318
  peptide (1)..(671): Ceres Seq. ID no. 13619222

SEQ ID NO: 117558 - DNA, 1785 bp, Arabidopsis thaliana; identical to SEQ ID NO: 106319
  misc_feature (1)..(1785): Ceres Seq. ID no. 13619227
  misc_feature (1)..(1785): Ortholog of  Ceres SEQ ID NO 15168908 as cited in SEQ ID NO 20765

SEQ ID NO: 117559 - protein, 473 aa, Arabidopsis thaliana; identical to SEQ ID NO: 30072
  peptide (1)..(473): Ceres Seq. ID no. 13619228

SEQ ID NO: 117560 - protein, 442 aa, Arabidopsis thaliana; identical to SEQ ID NO: 30073
  peptide (1)..(442): Ceres Seq. ID no. 13619229

SEQ ID NO: 117561 - protein, 400 aa, Arabidopsis thaliana; identical to SEQ ID NO: 30074
  peptide (1)..(400): Ceres Seq. ID no. 13619230

SEQ ID NO: 117562 - DNA, 2094 bp, Arabidopsis thaliana; identical to SEQ ID NO: 106323
  misc_feature (1)..(2094): Ceres Seq. ID no. 13619235
  misc_feature (1)..(2094): Ortholog of  Ceres SEQ ID NO 13590691 as cited in SEQ ID NO 66290

SEQ ID NO: 117563 - protein, 596 aa, Arabidopsis thaliana; identical to SEQ ID NO: 106324
  peptide (1)..(596): Ceres Seq. ID no. 13619236

SEQ ID NO: 117564 - protein, 448 aa, Arabidopsis thaliana; identical to SEQ ID NO: 106325
  peptide (1)..(448): Ceres Seq. ID no. 13619237

SEQ ID NO: 117565 - protein, 420 aa, Arabidopsis thaliana; identical to SEQ ID NO: 106326
  peptide (1)..(420): Ceres Seq. ID no. 13619238

SEQ ID NO: 117566 - DNA, 672 bp, Arabidopsis thaliana; identical to SEQ ID NO: 106327
  misc_feature (1)..(672): Ceres Seq. ID no. 13619247
  misc_feature (1)..(672): Ortholog of  Ceres SEQ ID NO 13583898 as cited in SEQ ID NO 63147

SEQ ID NO: 117567 - protein, 109 aa, Arabidopsis thaliana; identical to SEQ ID NO: 106328
  peptide (1)..(109): Ceres Seq. ID no. 13619248

SEQ ID NO: 117568 - DNA, 1441 bp, Arabidopsis thaliana; identical to SEQ ID NO: 106329
  misc_feature (1)..(1441): Ceres Seq. ID no. 13619261
  misc_feature (1)..(1441): Ortholog of  Ceres SEQ ID NO 13594037 as cited in SEQ ID NO 55666
  misc_feature (1)..(1441): Ortholog of  Ceres SEQ ID NO 15171501 as cited in SEQ ID NO 58322
  misc_feature (1)..(1441): Ortholog of  Ceres SEQ ID NO 13657707 as cited in SEQ ID NO 66407

SEQ ID NO: 117569 - protein, 407 aa, Arabidopsis thaliana; identical to SEQ ID NO: 106330
  peptide (1)..(407): Ceres Seq. ID no. 13619262

SEQ ID NO: 117570 - DNA, 1612 bp, Arabidopsis thaliana; identical to SEQ ID NO: 106331
  misc_feature (1)..(1612): Ceres Seq. ID no. 13619263
  misc_feature (1)..(1612): Ortholog of  Ceres SEQ ID NO 13594345 as cited in SEQ ID NO 58043
  misc_feature (1)..(1612): Ortholog of  Ceres SEQ ID NO 14314755 as cited in SEQ ID NO 59919
  misc_feature (1)..(1612): Ortholog of  Ceres SEQ ID NO 13597574 as cited in SEQ ID NO 64677
  misc_feature (1)..(1612): Ortholog of  Ceres SEQ ID NO 13597843 as cited in SEQ ID NO 64850
  misc_feature (1)..(1612): Ortholog of  Ceres SEQ ID NO 13597678 as cited in SEQ ID NO 65375
  misc_feature (1)..(1612): Ortholog of  Ceres SEQ ID NO 13662880 as cited in SEQ ID NO 65422
  misc_feature (1)..(1612): Ortholog of  Ceres SEQ ID NO 12779098 as cited in SEQ ID NO 67698
  misc_feature (1)..(1612): Ortholog of  Ceres SEQ ID NO 13596180 as cited in SEQ ID NO 67941
  misc_feature (1)..(1612): Ortholog of  Ceres SEQ ID NO 13591190 as cited in SEQ ID NO 68044
  misc_feature (1)..(1612): Ortholog of  Ceres SEQ ID NO 13595961 as cited in SEQ ID NO 68223

SEQ ID NO: 117571 - protein, 495 aa, Arabidopsis thaliana; identical to SEQ ID NO: 106332
  peptide (1)..(495): Ceres Seq. ID no. 13619264

SEQ ID NO: 117572 - protein, 476 aa, Arabidopsis thaliana; identical to SEQ ID NO: 106333
  peptide (1)..(476): Ceres Seq. ID no. 13619265

SEQ ID NO: 117573 - protein, 471 aa, Arabidopsis thaliana; identical to SEQ ID NO: 106334
  peptide (1)..(471): Ceres Seq. ID no. 13619266

SEQ ID NO: 117574 - DNA, 1165 bp, Arabidopsis thaliana; identical to SEQ ID NO: 106335
  misc_feature (1)..(1165): Ceres Seq. ID no. 13619287
  misc_feature (1)..(1165): Ortholog of  Ceres SEQ ID NO 12474685 as cited in SEQ ID NO 88
  misc_feature (1)..(1165): Ortholog of  Ceres SEQ ID NO 13638574 as cited in SEQ ID NO 51223
  misc_feature (1)..(1165): Ortholog of  Ceres SEQ ID NO 14311531 as cited in SEQ ID NO 51466
  misc_feature (1)..(1165): Ortholog of  Ceres SEQ ID NO 15170465 as cited in SEQ ID NO 52798
  misc_feature (1)..(1165): Ortholog of  Ceres SEQ ID NO 15177112 as cited in SEQ ID NO 55956
  misc_feature (1)..(1165): Ortholog of  Ceres SEQ ID NO 12610790 as cited in SEQ ID NO 56123
  misc_feature (1)..(1165): Ortholog of  Ceres SEQ ID NO 14315399 as cited in SEQ ID NO 57112
  misc_feature (1)..(1165): Ortholog of  Ceres SEQ ID NO 13655636 as cited in SEQ ID NO 63519
  misc_feature (1)..(1165): Ortholog of  Ceres SEQ ID NO 13655896 as cited in SEQ ID NO 64970

SEQ ID NO: 117575 - protein, 315 aa, Arabidopsis thaliana; identical to SEQ ID NO: 70899
  peptide (1)..(315): Ceres Seq. ID no. 13619288

SEQ ID NO: 117576 - protein, 173 aa, Arabidopsis thaliana; identical to SEQ ID NO: 70900
  peptide (1)..(173): Ceres Seq. ID no. 13619289

SEQ ID NO: 117577 - DNA, 1360 bp, Arabidopsis thaliana; identical to SEQ ID NO: 106338
  misc_feature (1)..(1360): Ceres Seq. ID no. 13619301
  misc_feature (1)..(1360): Ortholog of  Ceres SEQ ID NO 13595351 as cited in SEQ ID NO 55934
  misc_feature (1)..(1360): Ortholog of  Ceres SEQ ID NO 13639645 as cited in SEQ ID NO 57488

SEQ ID NO: 117578 - protein, 381 aa, Arabidopsis thaliana; identical to SEQ ID NO: 106339
  peptide (1)..(381): Ceres Seq. ID no. 13619302

SEQ ID NO: 117579 - protein, 363 aa, Arabidopsis thaliana; identical to SEQ ID NO: 106340
  peptide (1)..(363): Ceres Seq. ID no. 13619303

SEQ ID NO: 117580 - protein, 358 aa, Arabidopsis thaliana; identical to SEQ ID NO: 106341
  peptide (1)..(358): Ceres Seq. ID no. 13619304

SEQ ID NO: 117581 - DNA, 1580 bp, Arabidopsis thaliana; identical to SEQ ID NO: 106342
  misc_feature (1)..(1580): Ceres Seq. ID no. 13619309
  misc_feature (1)..(1580): Ortholog of  Ceres SEQ ID NO 14312212 as cited in SEQ ID NO 54399
  misc_feature (1)..(1580): Ortholog of  Ceres SEQ ID NO 15225341 as cited in SEQ ID NO 55222
  misc_feature (1)..(1580): Ortholog of  Ceres SEQ ID NO 13653980 as cited in SEQ ID NO 69253

SEQ ID NO: 117582 - protein, 410 aa, Arabidopsis thaliana; identical to SEQ ID NO: 106343
  peptide (1)..(410): Ceres Seq. ID no. 13619310

SEQ ID NO: 117583 - protein, 297 aa, Arabidopsis thaliana; identical to SEQ ID NO: 23306
  peptide (1)..(297): Ceres Seq. ID no. 13619311

SEQ ID NO: 117584 - DNA, 1115 bp, Arabidopsis thaliana; identical to SEQ ID NO: 106345
  misc_feature (1)..(1115): Ceres Seq. ID no. 13619316
  misc_feature (1)..(1115): Ortholog of  Ceres SEQ ID NO 13599585 as cited in SEQ ID NO 988
  misc_feature (1)..(1115): Ortholog of  Ceres SEQ ID NO 13594624 as cited in SEQ ID NO 55765
  misc_feature (1)..(1115): Ortholog of  Ceres SEQ ID NO 15177682 as cited in SEQ ID NO 0

SEQ ID NO: 117585 - protein, 258 aa, Arabidopsis thaliana; identical to SEQ ID NO: 71157
  peptide (1)..(258): Ceres Seq. ID no. 13619317

SEQ ID NO: 117586 - protein, 254 aa, Arabidopsis thaliana; identical to SEQ ID NO: 71158
  peptide (1)..(254): Ceres Seq. ID no. 13619318

SEQ ID NO: 117587 - DNA, 864 bp, Arabidopsis thaliana; identical to SEQ ID NO: 106348
  misc_feature (1)..(864): Ceres Seq. ID no. 13619319
  misc_feature (1)..(864): Ortholog of  Ceres SEQ ID NO 13594809 as cited in SEQ ID NO 51847
  misc_feature (1)..(864): Ortholog of  Ceres SEQ ID NO 14309033 as cited in SEQ ID NO 0

SEQ ID NO: 117588 - protein, 216 aa, Arabidopsis thaliana; identical to SEQ ID NO: 106349
  peptide (1)..(216): Ceres Seq. ID no. 13619320

SEQ ID NO: 117589 - protein, 212 aa, Arabidopsis thaliana; identical to SEQ ID NO: 25892
  peptide (1)..(212): Ceres Seq. ID no. 13619321

SEQ ID NO: 117590 - protein, 191 aa, Arabidopsis thaliana; identical to SEQ ID NO: 25893
  peptide (1)..(191): Ceres Seq. ID no. 13619322

SEQ ID NO: 117591 - DNA, 893 bp, Arabidopsis thaliana; identical to SEQ ID NO: 106352
  misc_feature (1)..(893): Ceres Seq. ID no. 13619331
  misc_feature (1)..(893): Ortholog of  Ceres SEQ ID NO 15178884 as cited in SEQ ID NO 0

SEQ ID NO: 117592 - protein, 250 aa, Arabidopsis thaliana; identical to SEQ ID NO: 106353
  peptide (1)..(250): Ceres Seq. ID no. 13619332

SEQ ID NO: 117593 - protein, 239 aa, Arabidopsis thaliana; identical to SEQ ID NO: 106354
  peptide (1)..(239): Ceres Seq. ID no. 13619333

SEQ ID NO: 117594 - DNA, 997 bp, Arabidopsis thaliana; identical to SEQ ID NO: 106355
  misc_feature (1)..(997): Ceres Seq. ID no. 13619357
  misc_feature (1)..(997): Ortholog of  Ceres SEQ ID NO 15176294 as cited in SEQ ID NO 60388

SEQ ID NO: 117595 - protein, 303 aa, Arabidopsis thaliana; identical to SEQ ID NO: 106356
  peptide (1)..(303): Ceres Seq. ID no. 13619358

SEQ ID NO: 117596 - protein, 249 aa, Arabidopsis thaliana; identical to SEQ ID NO: 106357
  peptide (1)..(249): Ceres Seq. ID no. 13619359

SEQ ID NO: 117597 - protein, 239 aa, Arabidopsis thaliana; identical to SEQ ID NO: 106358
  peptide (1)..(239): Ceres Seq. ID no. 13619360

SEQ ID NO: 117598 - DNA, 1125 bp, Arabidopsis thaliana; identical to SEQ ID NO: 106359
  misc_feature (1)..(1125): Ceres Seq. ID no. 13619361
  misc_feature (1)..(1125): Ortholog of  Ceres SEQ ID NO 13597376 as cited in SEQ ID NO 64002
  misc_feature (1)..(1125): Ortholog of  Ceres SEQ ID NO 13503573 as cited in SEQ ID NO 65402
  misc_feature (1)..(1125): Ortholog of  Ceres SEQ ID NO 13659615 as cited in SEQ ID NO 67248

SEQ ID NO: 117599 - protein, 236 aa, Arabidopsis thaliana; identical to SEQ ID NO: 106360
  peptide (1)..(236): Ceres Seq. ID no. 13619362

SEQ ID NO: 117600 - protein, 213 aa, Arabidopsis thaliana; identical to SEQ ID NO: 106361
  peptide (1)..(213): Ceres Seq. ID no. 13619363

SEQ ID NO: 117601 - protein, 193 aa, Arabidopsis thaliana; identical to SEQ ID NO: 106362
  peptide (1)..(193): Ceres Seq. ID no. 13619364

SEQ ID NO: 117602 - DNA, 1080 bp, Arabidopsis thaliana; identical to SEQ ID NO: 106363
  misc_feature (1)..(1080): Ceres Seq. ID no. 13619374
  misc_feature (1)..(1080): Ortholog of  Ceres SEQ ID NO 13596474 as cited in SEQ ID NO 62169
  misc_feature (1)..(1080): Ortholog of  Ceres SEQ ID NO 13598714 as cited in SEQ ID NO 62656
  misc_feature (1)..(1080): Ortholog of  Ceres SEQ ID NO 13596969 as cited in SEQ ID NO 63375
  misc_feature (1)..(1080): Ortholog of  Ceres SEQ ID NO 13597519 as cited in SEQ ID NO 64759
  misc_feature (1)..(1080): Ortholog of  Ceres SEQ ID NO 13597870 as cited in SEQ ID NO 64982
  misc_feature (1)..(1080): Ortholog of  Ceres SEQ ID NO 13587054 as cited in SEQ ID NO 0

SEQ ID NO: 117603 - protein, 336 aa, Arabidopsis thaliana; identical to SEQ ID NO: 106364
  peptide (1)..(336): Ceres Seq. ID no. 13619375

SEQ ID NO: 117604 - protein, 277 aa, Arabidopsis thaliana; identical to SEQ ID NO: 106365
  peptide (1)..(277): Ceres Seq. ID no. 13619376

SEQ ID NO: 117605 - protein, 248 aa, Arabidopsis thaliana; identical to SEQ ID NO: 106366
  peptide (1)..(248): Ceres Seq. ID no. 13619377

SEQ ID NO: 117606 - DNA, 2322 bp, Arabidopsis thaliana; identical to SEQ ID NO: 106367
  misc_feature (1)..(2322): Ceres Seq. ID no. 13619382
  misc_feature (1)..(2322): Ortholog of  Ceres SEQ ID NO 14307682 as cited in SEQ ID NO 54529

SEQ ID NO: 117607 - protein, 593 aa, Arabidopsis thaliana; identical to SEQ ID NO: 106368
  peptide (1)..(593): Ceres Seq. ID no. 13619383

SEQ ID NO: 117608 - protein, 500 aa, Arabidopsis thaliana; identical to SEQ ID NO: 106369
  peptide (1)..(500): Ceres Seq. ID no. 13619384

SEQ ID NO: 117609 - protein, 471 aa, Arabidopsis thaliana; identical to SEQ ID NO: 106370
  peptide (1)..(471): Ceres Seq. ID no. 13619385

SEQ ID NO: 117610 - DNA, 997 bp, Arabidopsis thaliana; identical to SEQ ID NO: 106371
  misc_feature (1)..(997): Ceres Seq. ID no. 13619398
  misc_feature (1)..(997): Ortholog of  Ceres SEQ ID NO 15172948 as cited in SEQ ID NO 51777
  misc_feature (1)..(997): Ortholog of  Ceres SEQ ID NO 12784416 as cited in SEQ ID NO 61324

SEQ ID NO: 117611 - protein, 218 aa, Arabidopsis thaliana; identical to SEQ ID NO: 27971
  peptide (1)..(218): Ceres Seq. ID no. 13619399

SEQ ID NO: 117612 - protein, 111 aa, Arabidopsis thaliana; identical to SEQ ID NO: 27972
  peptide (1)..(111): Ceres Seq. ID no. 13619400

SEQ ID NO: 117613 - DNA, 1673 bp, Arabidopsis thaliana; identical to SEQ ID NO: 106374
  misc_feature (1)..(1673): Ceres Seq. ID no. 13619401
  misc_feature (1)..(1673): Ortholog of  Ceres SEQ ID NO 15169199 as cited in SEQ ID NO 55297
  misc_feature (1)..(1673): Ortholog of  Ceres SEQ ID NO 15175690 as cited in SEQ ID NO 55466
  misc_feature (1)..(1673): Ortholog of  Ceres SEQ ID NO 15171197 as cited in SEQ ID NO 56892

SEQ ID NO: 117614 - protein, 394 aa, Arabidopsis thaliana; identical to SEQ ID NO: 106375
  peptide (1)..(394): Ceres Seq. ID no. 13619402

SEQ ID NO: 117615 - protein, 304 aa, Arabidopsis thaliana; identical to SEQ ID NO: 106376
  peptide (1)..(304): Ceres Seq. ID no. 13619403

SEQ ID NO: 117616 - protein, 256 aa, Arabidopsis thaliana; identical to SEQ ID NO: 106377
  peptide (1)..(256): Ceres Seq. ID no. 13619404

SEQ ID NO: 117617 - DNA, 2020 bp, Arabidopsis thaliana; identical to SEQ ID NO: 106378
  misc_feature (1)..(2020): Ceres Seq. ID no. 13619405
  misc_feature (1)..(2020): Ortholog of  Ceres SEQ ID NO 14302243 as cited in SEQ ID NO 64663

SEQ ID NO: 117618 - protein, 633 aa, Arabidopsis thaliana; identical to SEQ ID NO: 106379
  peptide (1)..(633): Ceres Seq. ID no. 13619406

SEQ ID NO: 117619 - protein, 632 aa, Arabidopsis thaliana; identical to SEQ ID NO: 106380
  peptide (1)..(632): Ceres Seq. ID no. 13619407

SEQ ID NO: 117620 - protein, 533 aa, Arabidopsis thaliana; identical to SEQ ID NO: 106381
  peptide (1)..(533): Ceres Seq. ID no. 13619408

SEQ ID NO: 117621 - DNA, 1769 bp, Arabidopsis thaliana; identical to SEQ ID NO: 106382
  misc_feature (1)..(1769): Ceres Seq. ID no. 13619413
  misc_feature (1)..(1769): Ortholog of  Ceres SEQ ID NO 15169627 as cited in SEQ ID NO 64517
  misc_feature (1)..(1769): Ortholog of  Ceres SEQ ID NO 14307952 as cited in SEQ ID NO 66029

SEQ ID NO: 117622 - protein, 506 aa, Arabidopsis thaliana; identical to SEQ ID NO: 106383
  peptide (1)..(506): Ceres Seq. ID no. 13619414

SEQ ID NO: 117623 - protein, 328 aa, Arabidopsis thaliana; identical to SEQ ID NO: 106384
  peptide (1)..(328): Ceres Seq. ID no. 13619415

SEQ ID NO: 117624 - protein, 321 aa, Arabidopsis thaliana; identical to SEQ ID NO: 106385
  peptide (1)..(321): Ceres Seq. ID no. 13619416

SEQ ID NO: 117625 - DNA, 1896 bp, Arabidopsis thaliana; identical to SEQ ID NO: 106386
  misc_feature (1)..(1896): Ceres Seq. ID no. 13619417
  misc_feature (1)..(1896): Ortholog of  Ceres SEQ ID NO 15169627 as cited in SEQ ID NO 64517
  misc_feature (1)..(1896): Ortholog of  Ceres SEQ ID NO 14307952 as cited in SEQ ID NO 66029

SEQ ID NO: 117626 - protein, 518 aa, Arabidopsis thaliana; identical to SEQ ID NO: 106387
  peptide (1)..(518): Ceres Seq. ID no. 13619418

SEQ ID NO: 117627 - protein, 510 aa, Arabidopsis thaliana; identical to SEQ ID NO: 106388
  peptide (1)..(510): Ceres Seq. ID no. 13619419

SEQ ID NO: 117628 - protein, 329 aa, Arabidopsis thaliana; identical to SEQ ID NO: 106389
  peptide (1)..(329): Ceres Seq. ID no. 13619420

SEQ ID NO: 117629 - DNA, 3404 bp, Arabidopsis thaliana; identical to SEQ ID NO: 106390
  misc_feature (1)..(3404): Ceres Seq. ID no. 13619460
  misc_feature (1)..(3404): Ortholog of  Ceres SEQ ID NO 12589728 as cited in SEQ ID NO 0
  misc_feature (1)..(3404): Ortholog of  Ceres SEQ ID NO 14302164 as cited in SEQ ID NO 0

SEQ ID NO: 117630 - protein, 1003 aa, Arabidopsis thaliana; identical to SEQ ID NO: 106391
  peptide (1)..(1003): Ceres Seq. ID no. 13619461

SEQ ID NO: 117631 - protein, 997 aa, Arabidopsis thaliana; identical to SEQ ID NO: 106392
  peptide (1)..(997): Ceres Seq. ID no. 13619462

SEQ ID NO: 117632 - protein, 932 aa, Arabidopsis thaliana; identical to SEQ ID NO: 106393
  peptide (1)..(932): Ceres Seq. ID no. 13619463

SEQ ID NO: 117633 - DNA, 1434 bp, Arabidopsis thaliana; identical to SEQ ID NO: 106394
  misc_feature (1)..(1434): Ceres Seq. ID no. 13619472
  misc_feature (1)..(1434): Ortholog of  Ceres SEQ ID NO 15175597 as cited in SEQ ID NO 58317

SEQ ID NO: 117634 - protein, 330 aa, Arabidopsis thaliana; identical to SEQ ID NO: 106395
  peptide (1)..(330): Ceres Seq. ID no. 13619473

SEQ ID NO: 117635 - protein, 266 aa, Arabidopsis thaliana; identical to SEQ ID NO: 106396
  peptide (1)..(266): Ceres Seq. ID no. 13619474

SEQ ID NO: 117636 - protein, 207 aa, Arabidopsis thaliana; identical to SEQ ID NO: 106397
  peptide (1)..(207): Ceres Seq. ID no. 13619475

SEQ ID NO: 117637 - DNA, 1509 bp, Arabidopsis thaliana; identical to SEQ ID NO: 106398
  misc_feature (1)..(1509): Ceres Seq. ID no. 13619476
  misc_feature (1)..(1509): Ortholog of  Ceres SEQ ID NO 13659033 as cited in SEQ ID NO 66372
  misc_feature (1)..(1509): Ortholog of  Ceres SEQ ID NO 13655724 as cited in SEQ ID NO 68973
  misc_feature (1)..(1509): Ortholog of  Ceres SEQ ID NO 12625899 as cited in SEQ ID NO 69079

SEQ ID NO: 117638 - protein, 451 aa, Arabidopsis thaliana; identical to SEQ ID NO: 106399
  peptide (1)..(451): Ceres Seq. ID no. 13619477

SEQ ID NO: 117639 - protein, 285 aa, Arabidopsis thaliana; identical to SEQ ID NO: 106400
  peptide (1)..(285): Ceres Seq. ID no. 13619478

SEQ ID NO: 117640 - protein, 276 aa, Arabidopsis thaliana; identical to SEQ ID NO: 106401
  peptide (1)..(276): Ceres Seq. ID no. 13619479

SEQ ID NO: 117641 - DNA, 1715 bp, Arabidopsis thaliana; identical to SEQ ID NO: 106402
  misc_feature (1)..(1715): Ceres Seq. ID no. 13619484
  misc_feature (1)..(1715): Ortholog of  Ceres SEQ ID NO 15224709 as cited in SEQ ID NO 68627

SEQ ID NO: 117642 - protein, 515 aa, Arabidopsis thaliana; identical to SEQ ID NO: 106403
  peptide (1)..(515): Ceres Seq. ID no. 13619485

SEQ ID NO: 117643 - protein, 502 aa, Arabidopsis thaliana; identical to SEQ ID NO: 106404
  peptide (1)..(502): Ceres Seq. ID no. 13619486

SEQ ID NO: 117644 - protein, 500 aa, Arabidopsis thaliana; identical to SEQ ID NO: 106405
  peptide (1)..(500): Ceres Seq. ID no. 13619487

SEQ ID NO: 117645 - DNA, 1517 bp, Arabidopsis thaliana; identical to SEQ ID NO: 106406
  misc_feature (1)..(1517): Ceres Seq. ID no. 13619514
  misc_feature (1)..(1517): Ortholog of  Ceres SEQ ID NO 12625948 as cited in SEQ ID NO 64717

SEQ ID NO: 117646 - protein, 440 aa, Arabidopsis thaliana; identical to SEQ ID NO: 29024
  peptide (1)..(440): Ceres Seq. ID no. 13619515

SEQ ID NO: 117647 - protein, 330 aa, Arabidopsis thaliana; identical to SEQ ID NO: 29025
  peptide (1)..(330): Ceres Seq. ID no. 13619516

SEQ ID NO: 117648 - protein, 322 aa, Arabidopsis thaliana; identical to SEQ ID NO: 106409
  peptide (1)..(322): Ceres Seq. ID no. 13619517

SEQ ID NO: 117649 - DNA, 851 bp, Arabidopsis thaliana; identical to SEQ ID NO: 106410
  misc_feature (1)..(851): Ceres Seq. ID no. 13619518
  misc_feature (1)..(851): Ortholog of  Ceres SEQ ID NO 15173803 as cited in SEQ ID NO 61759

SEQ ID NO: 117650 - protein, 233 aa, Arabidopsis thaliana; identical to SEQ ID NO: 26778
  peptide (1)..(233): Ceres Seq. ID no. 13619519

SEQ ID NO: 117651 - protein, 220 aa, Arabidopsis thaliana; identical to SEQ ID NO: 26779
  peptide (1)..(220): Ceres Seq. ID no. 13619520

SEQ ID NO: 117652 - protein, 116 aa, Arabidopsis thaliana; identical to SEQ ID NO: 26780
  peptide (1)..(116): Ceres Seq. ID no. 13619521

SEQ ID NO: 117653 - DNA, 1396 bp, Arabidopsis thaliana; identical to SEQ ID NO: 106414
  misc_feature (1)..(1396): Ceres Seq. ID no. 13619522
  misc_feature (1)..(1396): Ortholog of  Ceres SEQ ID NO 13647016 as cited in SEQ ID NO 20325
  misc_feature (1)..(1396): Ortholog of  Ceres SEQ ID NO 15179824 as cited in SEQ ID NO 66250
  misc_feature (1)..(1396): Ortholog of  Ceres SEQ ID NO 13657872 as cited in SEQ ID NO 66357

SEQ ID NO: 117654 - protein, 369 aa, Arabidopsis thaliana; identical to SEQ ID NO: 106415
  peptide (1)..(369): Ceres Seq. ID no. 13619523

SEQ ID NO: 117655 - protein, 308 aa, Arabidopsis thaliana; identical to SEQ ID NO: 106416
  peptide (1)..(308): Ceres Seq. ID no. 13619524

SEQ ID NO: 117656 - protein, 279 aa, Arabidopsis thaliana; identical to SEQ ID NO: 106417
  peptide (1)..(279): Ceres Seq. ID no. 13619525

SEQ ID NO: 117657 - DNA, 1602 bp, Arabidopsis thaliana; identical to SEQ ID NO: 106418
  misc_feature (1)..(1602): Ceres Seq. ID no. 13619526
  misc_feature (1)..(1602): Ortholog of  Ceres SEQ ID NO 13587235 as cited in SEQ ID NO 0

SEQ ID NO: 117658 - protein, 418 aa, Arabidopsis thaliana; identical to SEQ ID NO: 106419
  peptide (1)..(418): Ceres Seq. ID no. 13619527

SEQ ID NO: 117659 - protein, 400 aa, Arabidopsis thaliana; identical to SEQ ID NO: 106420
  peptide (1)..(400): Ceres Seq. ID no. 13619528

SEQ ID NO: 117660 - protein, 299 aa, Arabidopsis thaliana; identical to SEQ ID NO: 74702
  peptide (1)..(299): Ceres Seq. ID no. 13619529

SEQ ID NO: 117661 - DNA, 2002 bp, Arabidopsis thaliana; identical to SEQ ID NO: 106422
  misc_feature (1)..(2002): Ceres Seq. ID no. 13619537
  misc_feature (1)..(2002): Ortholog of  Ceres SEQ ID NO 13597732 as cited in SEQ ID NO 64810

SEQ ID NO: 117662 - protein, 600 aa, Arabidopsis thaliana; identical to SEQ ID NO: 41619
  peptide (1)..(600): Ceres Seq. ID no. 13619538

SEQ ID NO: 117663 - protein, 598 aa, Arabidopsis thaliana; identical to SEQ ID NO: 41620
  peptide (1)..(598): Ceres Seq. ID no. 13619539

SEQ ID NO: 117664 - protein, 578 aa, Arabidopsis thaliana; identical to SEQ ID NO: 41621
  peptide (1)..(578): Ceres Seq. ID no. 13619540

SEQ ID NO: 117665 - DNA, 1027 bp, Arabidopsis thaliana; identical to SEQ ID NO: 106426
  misc_feature (1)..(1027): Ceres Seq. ID no. 13619541
  misc_feature (1)..(1027): Ortholog of  Ceres SEQ ID NO 13638097 as cited in SEQ ID NO 57043
  misc_feature (1)..(1027): Ortholog of  Ceres SEQ ID NO 13596416 as cited in SEQ ID NO 62177
  misc_feature (1)..(1027): Ortholog of  Ceres SEQ ID NO 13659338 as cited in SEQ ID NO 66875

SEQ ID NO: 117666 - protein, 294 aa, Arabidopsis thaliana; identical to SEQ ID NO: 106427
  peptide (1)..(294): Ceres Seq. ID no. 13619542

SEQ ID NO: 117667 - protein, 279 aa, Arabidopsis thaliana; identical to SEQ ID NO: 25466
  peptide (1)..(279): Ceres Seq. ID no. 13619543

SEQ ID NO: 117668 - protein, 180 aa, Arabidopsis thaliana; identical to SEQ ID NO: 25467
  peptide (1)..(180): Ceres Seq. ID no. 13619544

SEQ ID NO: 117669 - DNA, 3590 bp, Arabidopsis thaliana; identical to SEQ ID NO: 106430
  misc_feature (1)..(3590): Ceres Seq. ID no. 13619549
  misc_feature (1)..(3590): Ortholog of  Ceres SEQ ID NO 13584744 as cited in SEQ ID NO 69137

SEQ ID NO: 117670 - protein, 1128 aa, Arabidopsis thaliana; identical to SEQ ID NO: 106431
  peptide (1)..(1128): Ceres Seq. ID no. 13619550

SEQ ID NO: 117671 - protein, 1106 aa, Arabidopsis thaliana; identical to SEQ ID NO: 106432
  peptide (1)..(1106): Ceres Seq. ID no. 13619551

SEQ ID NO: 117672 - protein, 1104 aa, Arabidopsis thaliana; identical to SEQ ID NO: 106433
  peptide (1)..(1104): Ceres Seq. ID no. 13619552

SEQ ID NO: 117673 - DNA, 1956 bp, Arabidopsis thaliana; identical to SEQ ID NO: 106434
  misc_feature (1)..(1956): Ceres Seq. ID no. 13619557
  misc_feature (1)..(1956): Ortholog of  Ceres SEQ ID NO 13597411 as cited in SEQ ID NO 64125

SEQ ID NO: 117674 - protein, 533 aa, Arabidopsis thaliana; identical to SEQ ID NO: 106435
  peptide (1)..(533): Ceres Seq. ID no. 13619558

SEQ ID NO: 117675 - protein, 523 aa, Arabidopsis thaliana; identical to SEQ ID NO: 106436
  peptide (1)..(523): Ceres Seq. ID no. 13619559

SEQ ID NO: 117676 - protein, 413 aa, Arabidopsis thaliana; identical to SEQ ID NO: 106437
  peptide (1)..(413): Ceres Seq. ID no. 13619560

SEQ ID NO: 117677 - DNA, 1139 bp, Arabidopsis thaliana; identical to SEQ ID NO: 106438
  misc_feature (1)..(1139): Ceres Seq. ID no. 13619580
  misc_feature (1)..(1139): Ortholog of  Ceres SEQ ID NO 14316324 as cited in SEQ ID NO 55612
  misc_feature (1)..(1139): Ortholog of  Ceres SEQ ID NO 14316378 as cited in SEQ ID NO 57746
  misc_feature (1)..(1139): Ortholog of  Ceres SEQ ID NO 13596097 as cited in SEQ ID NO 68421
  misc_feature (1)..(1139): Ortholog of  Ceres SEQ ID NO 13598439 as cited in SEQ ID NO 69016
  misc_feature (1)..(1139): Ortholog of  Ceres SEQ ID NO 13599524 as cited in SEQ ID NO 0

SEQ ID NO: 117678 - protein, 322 aa, Arabidopsis thaliana; identical to SEQ ID NO: 106439
  peptide (1)..(322): Ceres Seq. ID no. 13619581

SEQ ID NO: 117679 - protein, 306 aa, Arabidopsis thaliana; identical to SEQ ID NO: 106440
  peptide (1)..(306): Ceres Seq. ID no. 13619582

SEQ ID NO: 117680 - DNA, 1358 bp, Arabidopsis thaliana; identical to SEQ ID NO: 106441
  misc_feature (1)..(1358): Ceres Seq. ID no. 13619586
  misc_feature (1)..(1358): Ortholog of  Ceres SEQ ID NO 14304944 as cited in SEQ ID NO 53041
  misc_feature (1)..(1358): Ortholog of  Ceres SEQ ID NO 13654989 as cited in SEQ ID NO 63117
  misc_feature (1)..(1358): Ortholog of  Ceres SEQ ID NO 13584744 as cited in SEQ ID NO 69137

SEQ ID NO: 117681 - protein, 381 aa, Arabidopsis thaliana; identical to SEQ ID NO: 106442
  peptide (1)..(381): Ceres Seq. ID no. 13619587

SEQ ID NO: 117682 - protein, 368 aa, Arabidopsis thaliana; identical to SEQ ID NO: 106443
  peptide (1)..(368): Ceres Seq. ID no. 13619588

SEQ ID NO: 117683 - protein, 260 aa, Arabidopsis thaliana; identical to SEQ ID NO: 106444
  peptide (1)..(260): Ceres Seq. ID no. 13619589

SEQ ID NO: 117684 - DNA, 1329 bp, Arabidopsis thaliana; identical to SEQ ID NO: 106445
  misc_feature (1)..(1329): Ceres Seq. ID no. 13619590
  misc_feature (1)..(1329): Ortholog of  Ceres SEQ ID NO 15172476 as cited in SEQ ID NO 54945
  misc_feature (1)..(1329): Ortholog of  Ceres SEQ ID NO 13654989 as cited in SEQ ID NO 63117
  misc_feature (1)..(1329): Ortholog of  Ceres SEQ ID NO 13584744 as cited in SEQ ID NO 69137

SEQ ID NO: 117685 - protein, 442 aa, Arabidopsis thaliana; identical to SEQ ID NO: 106020
  peptide (1)..(442): Ceres Seq. ID no. 13619591

SEQ ID NO: 117686 - protein, 335 aa, Arabidopsis thaliana; identical to SEQ ID NO: 106021
  peptide (1)..(335): Ceres Seq. ID no. 13619592

SEQ ID NO: 117687 - DNA, 1488 bp, Arabidopsis thaliana; identical to SEQ ID NO: 106448
  misc_feature (1)..(1488): Ceres Seq. ID no. 13619593
  misc_feature (1)..(1488): Ortholog of  Ceres SEQ ID NO 14309384 as cited in SEQ ID NO 52806
  misc_feature (1)..(1488): Ortholog of  Ceres SEQ ID NO 14304136 as cited in SEQ ID NO 59024
  misc_feature (1)..(1488): Ortholog of  Ceres SEQ ID NO 14301836 as cited in SEQ ID NO 67386

SEQ ID NO: 117688 - protein, 285 aa, Arabidopsis thaliana; identical to SEQ ID NO: 106449
  peptide (1)..(285): Ceres Seq. ID no. 13619594

SEQ ID NO: 117689 - protein, 170 aa, Arabidopsis thaliana; identical to SEQ ID NO: 106450
  peptide (1)..(170): Ceres Seq. ID no. 13619595

SEQ ID NO: 117690 - DNA, 3160 bp, Arabidopsis thaliana; identical to SEQ ID NO: 106451
  misc_feature (1)..(3160): Ceres Seq. ID no. 13619604
  misc_feature (1)..(3160): Ortholog of  Ceres SEQ ID NO 13654989 as cited in SEQ ID NO 63117
  misc_feature (1)..(3160): Ortholog of  Ceres SEQ ID NO 13584744 as cited in SEQ ID NO 69137

SEQ ID NO: 117691 - protein, 942 aa, Arabidopsis thaliana; identical to SEQ ID NO: 106452
  peptide (1)..(942): Ceres Seq. ID no. 13619605

SEQ ID NO: 117692 - protein, 911 aa, Arabidopsis thaliana; identical to SEQ ID NO: 106453
  peptide (1)..(911): Ceres Seq. ID no. 13619606

SEQ ID NO: 117693 - protein, 826 aa, Arabidopsis thaliana; identical to SEQ ID NO: 106454
  peptide (1)..(826): Ceres Seq. ID no. 13619607

SEQ ID NO: 117694 - DNA, 1000 bp, Arabidopsis thaliana; identical to SEQ ID NO: 106455
  misc_feature (1)..(1000): Ceres Seq. ID no. 13619612
  misc_feature (1)..(1000): Ortholog of  Ceres SEQ ID NO 13595569 as cited in SEQ ID NO 56778
  misc_feature (1)..(1000): Ortholog of  Ceres SEQ ID NO 12611159 as cited in SEQ ID NO 59821

SEQ ID NO: 117695 - protein, 249 aa, Arabidopsis thaliana; identical to SEQ ID NO: 106456
  peptide (1)..(249): Ceres Seq. ID no. 13619613

SEQ ID NO: 117696 - protein, 129 aa, Arabidopsis thaliana; identical to SEQ ID NO: 106457
  peptide (1)..(129): Ceres Seq. ID no. 13619614

SEQ ID NO: 117697 - DNA, 1322 bp, Arabidopsis thaliana; identical to SEQ ID NO: 106458
  misc_feature (1)..(1322): Ceres Seq. ID no. 13619615
  misc_feature (1)..(1322): Ortholog of  Ceres SEQ ID NO 13596281 as cited in SEQ ID NO 68146

SEQ ID NO: 117698 - protein, 372 aa, Arabidopsis thaliana; identical to SEQ ID NO: 106459
  peptide (1)..(372): Ceres Seq. ID no. 13619616

SEQ ID NO: 117699 - protein, 355 aa, Arabidopsis thaliana; identical to SEQ ID NO: 106460
  peptide (1)..(355): Ceres Seq. ID no. 13619617

SEQ ID NO: 117700 - DNA, 2070 bp, Arabidopsis thaliana; identical to SEQ ID NO: 106461
  misc_feature (1)..(2070): Ceres Seq. ID no. 13619622
  misc_feature (1)..(2070): Ortholog of  Ceres SEQ ID NO 15174947 as cited in SEQ ID NO 236

SEQ ID NO: 117701 - protein, 615 aa, Arabidopsis thaliana; identical to SEQ ID NO: 106462
  peptide (1)..(615): Ceres Seq. ID no. 13619623

SEQ ID NO: 117702 - protein, 575 aa, Arabidopsis thaliana; identical to SEQ ID NO: 106463
  peptide (1)..(575): Ceres Seq. ID no. 13619624

SEQ ID NO: 117703 - protein, 556 aa, Arabidopsis thaliana; identical to SEQ ID NO: 106464
  peptide (1)..(556): Ceres Seq. ID no. 13619625

SEQ ID NO: 117704 - DNA, 709 bp, Arabidopsis thaliana; identical to SEQ ID NO: 106465
  misc_feature (1)..(709): Ceres Seq. ID no. 13619630
  misc_feature (1)..(709): Ortholog of  Ceres SEQ ID NO 13598935 as cited in SEQ ID NO 1239
  misc_feature (1)..(709): Ortholog of  Ceres SEQ ID NO 14316515 as cited in SEQ ID NO 57228
  misc_feature (1)..(709): Ortholog of  Ceres SEQ ID NO 13598171 as cited in SEQ ID NO 61357
  misc_feature (1)..(709): Ortholog of  Ceres SEQ ID NO 13664149 as cited in SEQ ID NO 61490

SEQ ID NO: 117705 - protein, 185 aa, Arabidopsis thaliana; identical to SEQ ID NO: 106466
  peptide (1)..(185): Ceres Seq. ID no. 13619631

SEQ ID NO: 117706 - protein, 125 aa, Arabidopsis thaliana; identical to SEQ ID NO: 106467
  peptide (1)..(125): Ceres Seq. ID no. 13619632

SEQ ID NO: 117707 - protein, 110 aa, Arabidopsis thaliana; identical to SEQ ID NO: 106468
  peptide (1)..(110): Ceres Seq. ID no. 13619633

SEQ ID NO: 117708 - DNA, 1075 bp, Arabidopsis thaliana; identical to SEQ ID NO: 106469
  misc_feature (1)..(1075): Ceres Seq. ID no. 13619634
  misc_feature (1)..(1075): Ortholog of  Ceres SEQ ID NO 15179676 as cited in SEQ ID NO 52442
  misc_feature (1)..(1075): Ortholog of  Ceres SEQ ID NO 13582807 as cited in SEQ ID NO 67806

SEQ ID NO: 117709 - protein, 284 aa, Arabidopsis thaliana; identical to SEQ ID NO: 38082
  peptide (1)..(284): Ceres Seq. ID no. 13619635

SEQ ID NO: 117710 - protein, 185 aa, Arabidopsis thaliana; identical to SEQ ID NO: 38083
  peptide (1)..(185): Ceres Seq. ID no. 13619636

SEQ ID NO: 117711 - protein, 182 aa, Arabidopsis thaliana; identical to SEQ ID NO: 38084
  peptide (1)..(182): Ceres Seq. ID no. 13619637

SEQ ID NO: 117712 - DNA, 1996 bp, Arabidopsis thaliana; identical to SEQ ID NO: 106473
  misc_feature (1)..(1996): Ceres Seq. ID no. 13619646
  misc_feature (1)..(1996): Ortholog of  Ceres SEQ ID NO 14313739 as cited in SEQ ID NO 54143
  misc_feature (1)..(1996): Ortholog of  Ceres SEQ ID NO 14308217 as cited in SEQ ID NO 58569

SEQ ID NO: 117713 - protein, 649 aa, Arabidopsis thaliana; identical to SEQ ID NO: 106474
  peptide (1)..(649): Ceres Seq. ID no. 13619647

SEQ ID NO: 117714 - protein, 635 aa, Arabidopsis thaliana; identical to SEQ ID NO: 99465
  peptide (1)..(635): Ceres Seq. ID no. 13619648

SEQ ID NO: 117715 - protein, 577 aa, Arabidopsis thaliana; identical to SEQ ID NO: 106476
  peptide (1)..(577): Ceres Seq. ID no. 13619649

SEQ ID NO: 117716 - DNA, 1782 bp, Arabidopsis thaliana; identical to SEQ ID NO: 106477
  misc_feature (1)..(1782): Ceres Seq. ID no. 13619660
  misc_feature (1)..(1782): Ortholog of  Ceres SEQ ID NO 13660287 as cited in SEQ ID NO 67316

SEQ ID NO: 117717 - protein, 528 aa, Arabidopsis thaliana; identical to SEQ ID NO: 106478
  peptide (1)..(528): Ceres Seq. ID no. 13619661

SEQ ID NO: 117718 - protein, 505 aa, Arabidopsis thaliana [sequence omitted]

SEQ ID NO: 117719 - protein, 411 aa, Arabidopsis thaliana; identical to SEQ ID NO: 106480
  peptide (1)..(411): Ceres Seq. ID no. 13619663

SEQ ID NO: 117720 - DNA, 1303 bp, Arabidopsis thaliana; identical to SEQ ID NO: 106481
  misc_feature (1)..(1303): Ceres Seq. ID no. 13619672
  misc_feature (1)..(1303): Ortholog of  Ceres SEQ ID NO 15177037 as cited in SEQ ID NO 60242

SEQ ID NO: 117721 - protein, 363 aa, Arabidopsis thaliana; identical to SEQ ID NO: 106482
  peptide (1)..(363): Ceres Seq. ID no. 13619673

SEQ ID NO: 117722 - protein, 268 aa, Arabidopsis thaliana; identical to SEQ ID NO: 106483
  peptide (1)..(268): Ceres Seq. ID no. 13619674

SEQ ID NO: 117723 - protein, 257 aa, Arabidopsis thaliana; identical to SEQ ID NO: 106484
  peptide (1)..(257): Ceres Seq. ID no. 13619675

SEQ ID NO: 117724 - DNA, 913 bp, Arabidopsis thaliana; identical to SEQ ID NO: 106485
  misc_feature (1)..(913): Ceres Seq. ID no. 13619688
  misc_feature (1)..(913): Ortholog of  Ceres SEQ ID NO 13597679 as cited in SEQ ID NO 65073

SEQ ID NO: 117725 - protein, 266 aa, Arabidopsis thaliana; identical to SEQ ID NO: 106486
  peptide (1)..(266): Ceres Seq. ID no. 13619689

SEQ ID NO: 117726 - protein, 260 aa, Arabidopsis thaliana; identical to SEQ ID NO: 21801
  peptide (1)..(260): Ceres Seq. ID no. 13619690

SEQ ID NO: 117727 - protein, 250 aa, Arabidopsis thaliana; identical to SEQ ID NO: 21802
  peptide (1)..(250): Ceres Seq. ID no. 13619691

SEQ ID NO: 117728 - DNA, 1254 bp, Arabidopsis thaliana; identical to SEQ ID NO: 106489
  misc_feature (1)..(1254): Ceres Seq. ID no. 13619700
  misc_feature (1)..(1254): Ortholog of  Ceres SEQ ID NO 14311922 as cited in SEQ ID NO 51539

SEQ ID NO: 117729 - protein, 312 aa, Arabidopsis thaliana; identical to SEQ ID NO: 26572
  peptide (1)..(312): Ceres Seq. ID no. 13619701

SEQ ID NO: 117730 - protein, 286 aa, Arabidopsis thaliana; identical to SEQ ID NO: 26573
  peptide (1)..(286): Ceres Seq. ID no. 13619702

SEQ ID NO: 117731 - protein, 213 aa, Arabidopsis thaliana; identical to SEQ ID NO: 26574
  peptide (1)..(213): Ceres Seq. ID no. 13619703

SEQ ID NO: 117732 - DNA, 672 bp, Arabidopsis thaliana; identical to SEQ ID NO: 106493
  misc_feature (1)..(672): Ceres Seq. ID no. 13619704
  misc_feature (1)..(672): Ortholog of  Ceres SEQ ID NO 13655287 as cited in SEQ ID NO 63004
  misc_feature (1)..(672): Ortholog of  Ceres SEQ ID NO 15173178 as cited in SEQ ID NO 64574

SEQ ID NO: 117733 - protein, 130 aa, Arabidopsis thaliana; identical to SEQ ID NO: 23618
  peptide (1)..(130): Ceres Seq. ID no. 13619705

SEQ ID NO: 117734 - protein, 117 aa, Arabidopsis thaliana; identical to SEQ ID NO: 23619
  peptide (1)..(117): Ceres Seq. ID no. 13619706

SEQ ID NO: 117735 - protein, 105 aa, Arabidopsis thaliana; identical to SEQ ID NO: 23620
  peptide (1)..(105): Ceres Seq. ID no. 13619707

SEQ ID NO: 117736 - DNA, 2719 bp, Arabidopsis thaliana; identical to SEQ ID NO: 106497
  misc_feature (1)..(2719): Ceres Seq. ID no. 13619708
  misc_feature (1)..(2719): Ortholog of  Ceres SEQ ID NO 13623497 as cited in SEQ ID NO 0

SEQ ID NO: 117737 - protein, 790 aa, Arabidopsis thaliana; identical to SEQ ID NO: 106498
  peptide (1)..(790): Ceres Seq. ID no. 13619709

SEQ ID NO: 117738 - protein, 743 aa, Arabidopsis thaliana; identical to SEQ ID NO: 106499
  peptide (1)..(743): Ceres Seq. ID no. 13619710

SEQ ID NO: 117739 - protein, 731 aa, Arabidopsis thaliana; identical to SEQ ID NO: 106500
  peptide (1)..(731): Ceres Seq. ID no. 13619711

SEQ ID NO: 117740 - DNA, 1313 bp, Arabidopsis thaliana; identical to SEQ ID NO: 106501
  misc_feature (1)..(1313): Ceres Seq. ID no. 13619728
  misc_feature (1)..(1313): Ortholog of  Ceres SEQ ID NO 15177854 as cited in SEQ ID NO 51851
  misc_feature (1)..(1313): Ortholog of  Ceres SEQ ID NO 15177087 as cited in SEQ ID NO 51932
  misc_feature (1)..(1313): Ortholog of  Ceres SEQ ID NO 13662937 as cited in SEQ ID NO 64415
  misc_feature (1)..(1313): Ortholog of  Ceres SEQ ID NO 13595984 as cited in SEQ ID NO 68340
  misc_feature (1)..(1313): Ortholog of  Ceres SEQ ID NO 12635014 as cited in SEQ ID NO 0

SEQ ID NO: 117741 - protein, 374 aa, Arabidopsis thaliana; identical to SEQ ID NO: 106502
  peptide (1)..(374): Ceres Seq. ID no. 13619729

SEQ ID NO: 117742 - protein, 372 aa, Arabidopsis thaliana; identical to SEQ ID NO: 106503
  peptide (1)..(372): Ceres Seq. ID no. 13619730

SEQ ID NO: 117743 - protein, 355 aa, Arabidopsis thaliana; identical to SEQ ID NO: 106504
  peptide (1)..(355): Ceres Seq. ID no. 13619731

SEQ ID NO: 117744 - DNA, 1611 bp, Arabidopsis thaliana; identical to SEQ ID NO: 106505
  misc_feature (1)..(1611): Ceres Seq. ID no. 13619788
  misc_feature (1)..(1611): Ortholog of  Ceres SEQ ID NO 15170151 as cited in SEQ ID NO 53069
  misc_feature (1)..(1611): Ortholog of  Ceres SEQ ID NO 13594209 as cited in SEQ ID NO 59089
  misc_feature (1)..(1611): Ortholog of  Ceres SEQ ID NO 14308041 as cited in SEQ ID NO 62601
  misc_feature (1)..(1611): Ortholog of  Ceres SEQ ID NO 14303546 as cited in SEQ ID NO 64893
  misc_feature (1)..(1611): Ortholog of  Ceres SEQ ID NO 15176783 as cited in SEQ ID NO 65590
  misc_feature (1)..(1611): Ortholog of  Ceres SEQ ID NO 14308007 as cited in SEQ ID NO 65760
  misc_feature (1)..(1611): Ortholog of  Ceres SEQ ID NO 14308019 as cited in SEQ ID NO 65849
  misc_feature (1)..(1611): Ortholog of  Ceres SEQ ID NO 15170163 as cited in SEQ ID NO 66262
  misc_feature (1)..(1611): Ortholog of  Ceres SEQ ID NO 13502874 as cited in SEQ ID NO 66298
  misc_feature (1)..(1611): Ortholog of  Ceres SEQ ID NO 14307944 as cited in SEQ ID NO 66503
  misc_feature (1)..(1611): Ortholog of  Ceres SEQ ID NO 12614124 as cited in SEQ ID NO 68392

SEQ ID NO: 117745 - protein, 502 aa, Arabidopsis thaliana; identical to SEQ ID NO: 106506
  peptide (1)..(502): Ceres Seq. ID no. 13619789

SEQ ID NO: 117746 - protein, 438 aa, Arabidopsis thaliana; identical to SEQ ID NO: 106507
  peptide (1)..(438): Ceres Seq. ID no. 13619790

SEQ ID NO: 117747 - protein, 353 aa, Arabidopsis thaliana; identical to SEQ ID NO: 106508
  peptide (1)..(353): Ceres Seq. ID no. 13619791

SEQ ID NO: 117748 - DNA, 865 bp, Arabidopsis thaliana; identical to SEQ ID NO: 106509
  misc_feature (1)..(865): Ceres Seq. ID no. 13619795
  misc_feature (1)..(865): Ortholog of  Ceres SEQ ID NO 14306299 as cited in SEQ ID NO 56895
  misc_feature (1)..(865): Ortholog of  Ceres SEQ ID NO 13663631 as cited in SEQ ID NO 67073

SEQ ID NO: 117749 - protein, 212 aa, Arabidopsis thaliana; identical to SEQ ID NO: 106510
  peptide (1)..(212): Ceres Seq. ID no. 13619796

SEQ ID NO: 117750 - protein, 207 aa, Arabidopsis thaliana; identical to SEQ ID NO: 106511
  peptide (1)..(207): Ceres Seq. ID no. 13619797

SEQ ID NO: 117751 - DNA, 1021 bp, Arabidopsis thaliana; identical to SEQ ID NO: 106512
  misc_feature (1)..(1021): Ceres Seq. ID no. 13619802
  misc_feature (1)..(1021): Ortholog of  Ceres SEQ ID NO 14308727 as cited in SEQ ID NO 58726
  misc_feature (1)..(1021): Ortholog of  Ceres SEQ ID NO 13663517 as cited in SEQ ID NO 66850

SEQ ID NO: 117752 - protein, 231 aa, Arabidopsis thaliana; identical to SEQ ID NO: 26129
  peptide (1)..(231): Ceres Seq. ID no. 13619803

SEQ ID NO: 117753 - protein, 220 aa, Arabidopsis thaliana; identical to SEQ ID NO: 26130
  peptide (1)..(220): Ceres Seq. ID no. 13619804

SEQ ID NO: 117754 - protein, 208 aa, Arabidopsis thaliana; identical to SEQ ID NO: 26131
  peptide (1)..(208): Ceres Seq. ID no. 13619805

SEQ ID NO: 117755 - DNA, 723 bp, Arabidopsis thaliana; identical to SEQ ID NO: 106516
  misc_feature (1)..(723): Ceres Seq. ID no. 13619806
  misc_feature (1)..(723): Ortholog of  Ceres SEQ ID NO 12608953 as cited in SEQ ID NO 51227

SEQ ID NO: 117756 - protein, 142 aa, Arabidopsis thaliana; identical to SEQ ID NO: 25026
  peptide (1)..(142): Ceres Seq. ID no. 13619807

SEQ ID NO: 117757 - DNA, 2270 bp, Arabidopsis thaliana; identical to SEQ ID NO: 106518
  misc_feature (1)..(2270): Ceres Seq. ID no. 13619808
  misc_feature (1)..(2270): Ortholog of  Ceres SEQ ID NO 13596198 as cited in SEQ ID NO 68488

SEQ ID NO: 117758 - protein, 666 aa, Arabidopsis thaliana; identical to SEQ ID NO: 106519
  peptide (1)..(666): Ceres Seq. ID no. 13619809

SEQ ID NO: 117759 - protein, 604 aa, Arabidopsis thaliana; identical to SEQ ID NO: 106520
  peptide (1)..(604): Ceres Seq. ID no. 13619810

SEQ ID NO: 117760 - protein, 582 aa, Arabidopsis thaliana; identical to SEQ ID NO: 106521
  peptide (1)..(582): Ceres Seq. ID no. 13619811

SEQ ID NO: 117761 - DNA, 1547 bp, Arabidopsis thaliana; identical to SEQ ID NO: 106522
  misc_feature (1)..(1547): Ceres Seq. ID no. 13619816
  misc_feature (1)..(1547): Ortholog of  Ceres SEQ ID NO 14314404 as cited in SEQ ID NO 57421
  misc_feature (1)..(1547): Ortholog of  Ceres SEQ ID NO 13493536 as cited in SEQ ID NO 58515
  misc_feature (1)..(1547): Ortholog of  Ceres SEQ ID NO 15225741 as cited in SEQ ID NO 59606
  misc_feature (1)..(1547): Ortholog of  Ceres SEQ ID NO 12618461 as cited in SEQ ID NO 64349

SEQ ID NO: 117762 - protein, 424 aa, Arabidopsis thaliana; identical to SEQ ID NO: 36315
  peptide (1)..(424): Ceres Seq. ID no. 13619817

SEQ ID NO: 117763 - protein, 421 aa, Arabidopsis thaliana; identical to SEQ ID NO: 36316
  peptide (1)..(421): Ceres Seq. ID no. 13619818

SEQ ID NO: 117764 - protein, 312 aa, Arabidopsis thaliana; identical to SEQ ID NO: 36317
  peptide (1)..(312): Ceres Seq. ID no. 13619819

SEQ ID NO: 117765 - DNA, 688 bp, Arabidopsis thaliana; identical to SEQ ID NO: 106526
  misc_feature (1)..(688): Ceres Seq. ID no. 13619820
  misc_feature (1)..(688): Ortholog of  Ceres SEQ ID NO 13575779 as cited in SEQ ID NO 20515

SEQ ID NO: 117766 - protein, 164 aa, Arabidopsis thaliana; identical to SEQ ID NO: 36570
  peptide (1)..(164): Ceres Seq. ID no. 13619821

SEQ ID NO: 117767 - protein, 113 aa, Arabidopsis thaliana; identical to SEQ ID NO: 36571
  peptide (1)..(113): Ceres Seq. ID no. 13619822

SEQ ID NO: 117768 - protein, 89 aa, Arabidopsis thaliana; identical to SEQ ID NO: 36572
  peptide (1)..(89): Ceres Seq. ID no. 13619823

SEQ ID NO: 117769 - DNA, 1048 bp, Arabidopsis thaliana; identical to SEQ ID NO: 106530
  misc_feature (1)..(1048): Ceres Seq. ID no. 13619830
  misc_feature (1)..(1048): Ortholog of  Ceres SEQ ID NO 15179139 as cited in SEQ ID NO 1093
  misc_feature (1)..(1048): Ortholog of  Ceres SEQ ID NO 15226793 as cited in SEQ ID NO 58689

SEQ ID NO: 117770 - protein, 254 aa, Arabidopsis thaliana; identical to SEQ ID NO: 35412
  peptide (1)..(254): Ceres Seq. ID no. 13619831

SEQ ID NO: 117771 - protein, 252 aa, Arabidopsis thaliana; identical to SEQ ID NO: 35413
  peptide (1)..(252): Ceres Seq. ID no. 13619832

SEQ ID NO: 117772 - protein, 242 aa, Arabidopsis thaliana; identical to SEQ ID NO: 35414
  peptide (1)..(242): Ceres Seq. ID no. 13619833

SEQ ID NO: 117773 - DNA, 1147 bp, Arabidopsis thaliana; identical to SEQ ID NO: 106534
  misc_feature (1)..(1147): Ceres Seq. ID no. 13619838
  misc_feature (1)..(1147): Ortholog of  Ceres SEQ ID NO 15180785 as cited in SEQ ID NO 0

SEQ ID NO: 117774 - protein, 320 aa, Arabidopsis thaliana; identical to SEQ ID NO: 106535
  peptide (1)..(320): Ceres Seq. ID no. 13619839

SEQ ID NO: 117775 - protein, 303 aa, Arabidopsis thaliana; identical to SEQ ID NO: 106536
  peptide (1)..(303): Ceres Seq. ID no. 13619840

SEQ ID NO: 117776 - DNA, 984 bp, Arabidopsis thaliana; identical to SEQ ID NO: 106537
  misc_feature (1)..(984): Ceres Seq. ID no. 13619841
  misc_feature (1)..(984): Ortholog of  Ceres SEQ ID NO 13663517 as cited in SEQ ID NO 66850

SEQ ID NO: 117777 - protein, 248 aa, Arabidopsis thaliana; identical to SEQ ID NO: 35056
  peptide (1)..(248): Ceres Seq. ID no. 13619842

SEQ ID NO: 117778 - protein, 234 aa, Arabidopsis thaliana; identical to SEQ ID NO: 35057
  peptide (1)..(234): Ceres Seq. ID no. 13619843

SEQ ID NO: 117779 - protein, 160 aa, Arabidopsis thaliana; identical to SEQ ID NO: 35058
  peptide (1)..(160): Ceres Seq. ID no. 13619844

SEQ ID NO: 117780 - DNA, 1227 bp, Arabidopsis thaliana; identical to SEQ ID NO: 106541
  misc_feature (1)..(1227): Ceres Seq. ID no. 13619845
  misc_feature (1)..(1227): Ortholog of  Ceres SEQ ID NO 14305750 as cited in SEQ ID NO 52458
  misc_feature (1)..(1227): Ortholog of  Ceres SEQ ID NO 12608276 as cited in SEQ ID NO 57871
  misc_feature (1)..(1227): Ortholog of  Ceres SEQ ID NO 13598492 as cited in SEQ ID NO 63882
  misc_feature (1)..(1227): Ortholog of  Ceres SEQ ID NO 13657914 as cited in SEQ ID NO 66230
  misc_feature (1)..(1227): Ortholog of  Ceres SEQ ID NO 13595877 as cited in SEQ ID NO 67702
  misc_feature (1)..(1227): Ortholog of  Ceres SEQ ID NO 13622667 as cited in SEQ ID NO 0

SEQ ID NO: 117781 - protein, 349 aa, Arabidopsis thaliana; identical to SEQ ID NO: 106542
  peptide (1)..(349): Ceres Seq. ID no. 13619846

SEQ ID NO: 117782 - protein, 329 aa, Arabidopsis thaliana; identical to SEQ ID NO: 106543
  peptide (1)..(329): Ceres Seq. ID no. 13619847

SEQ ID NO: 117783 - protein, 318 aa, Arabidopsis thaliana; identical to SEQ ID NO: 106544
  peptide (1)..(318): Ceres Seq. ID no. 13619848

SEQ ID NO: 117784 - DNA, 3377 bp, Arabidopsis thaliana; identical to SEQ ID NO: 106545
  misc_feature (1)..(3377): Ceres Seq. ID no. 13619869
  misc_feature (1)..(3377): Ortholog of  Ceres SEQ ID NO 13600310 as cited in SEQ ID NO 5086

SEQ ID NO: 117785 - protein, 1051 aa, Arabidopsis thaliana; identical to SEQ ID NO: 106546
  peptide (1)..(1051): Ceres Seq. ID no. 13619870

SEQ ID NO: 117786 - protein, 993 aa, Arabidopsis thaliana; identical to SEQ ID NO: 106547
  peptide (1)..(993): Ceres Seq. ID no. 13619871

SEQ ID NO: 117787 - protein, 972 aa, Arabidopsis thaliana; identical to SEQ ID NO: 106548
  peptide (1)..(972): Ceres Seq. ID no. 13619872

SEQ ID NO: 117788 - DNA, 927 bp, Arabidopsis thaliana; identical to SEQ ID NO: 106549
  misc_feature (1)..(927): Ceres Seq. ID no. 13619922
  misc_feature (1)..(927): Ortholog of  Ceres SEQ ID NO 12611884 as cited in SEQ ID NO 51018
  misc_feature (1)..(927): Ortholog of  Ceres SEQ ID NO 12609093 as cited in SEQ ID NO 52008
  misc_feature (1)..(927): Ortholog of  Ceres SEQ ID NO 12609839 as cited in SEQ ID NO 52022
  misc_feature (1)..(927): Ortholog of  Ceres SEQ ID NO 13638885 as cited in SEQ ID NO 55803
  misc_feature (1)..(927): Ortholog of  Ceres SEQ ID NO 14301452 as cited in SEQ ID NO 60984
  misc_feature (1)..(927): Ortholog of  Ceres SEQ ID NO 12587429 as cited in SEQ ID NO 63113
  misc_feature (1)..(927): Ortholog of  Ceres SEQ ID NO 12615635 as cited in SEQ ID NO 63133
  misc_feature (1)..(927): Ortholog of  Ceres SEQ ID NO 12586351 as cited in SEQ ID NO 64028
  misc_feature (1)..(927): Ortholog of  Ceres SEQ ID NO 13654441 as cited in SEQ ID NO 67814
  misc_feature (1)..(927): Ortholog of  Ceres SEQ ID NO 14309027 as cited in SEQ ID NO 0

SEQ ID NO: 117789 - protein, 234 aa, Arabidopsis thaliana; identical to SEQ ID NO: 106550
  peptide (1)..(234): Ceres Seq. ID no. 13619923

SEQ ID NO: 117790 - protein, 231 aa, Arabidopsis thaliana; identical to SEQ ID NO: 106551
  peptide (1)..(231): Ceres Seq. ID no. 13619924

SEQ ID NO: 117791 - protein, 155 aa, Arabidopsis thaliana; identical to SEQ ID NO: 106552
  peptide (1)..(155): Ceres Seq. ID no. 13619925

SEQ ID NO: 117792 - DNA, 1802 bp, Arabidopsis thaliana; identical to SEQ ID NO: 106553
  misc_feature (1)..(1802): Ceres Seq. ID no. 13619930
  misc_feature (1)..(1802): Ortholog of  Ceres SEQ ID NO 14312057 as cited in SEQ ID NO 58388

SEQ ID NO: 117793 - protein, 554 aa, Arabidopsis thaliana; identical to SEQ ID NO: 106554
  peptide (1)..(554): Ceres Seq. ID no. 13619931

SEQ ID NO: 117794 - protein, 538 aa, Arabidopsis thaliana; identical to SEQ ID NO: 106555
  peptide (1)..(538): Ceres Seq. ID no. 13619932

SEQ ID NO: 117795 - protein, 425 aa, Arabidopsis thaliana; identical to SEQ ID NO: 106556
  peptide (1)..(425): Ceres Seq. ID no. 13619933

SEQ ID NO: 117796 - DNA, 1430 bp, Arabidopsis thaliana; identical to SEQ ID NO: 106557
  misc_feature (1)..(1430): Ceres Seq. ID no. 13619958
  misc_feature (1)..(1430): Ortholog of  Ceres SEQ ID NO 14306667 as cited in SEQ ID NO 52925
  misc_feature (1)..(1430): Ortholog of  Ceres SEQ ID NO 15177522 as cited in SEQ ID NO 0

SEQ ID NO: 117797 - protein, 405 aa, Arabidopsis thaliana; identical to SEQ ID NO: 106558
  peptide (1)..(405): Ceres Seq. ID no. 13619959

SEQ ID NO: 117798 - protein, 284 aa, Arabidopsis thaliana; identical to SEQ ID NO: 106559
  peptide (1)..(284): Ceres Seq. ID no. 13619960

SEQ ID NO: 117799 - protein, 267 aa, Arabidopsis thaliana; identical to SEQ ID NO: 106560
  peptide (1)..(267): Ceres Seq. ID no. 13619961

SEQ ID NO: 117800 - DNA, 1205 bp, Arabidopsis thaliana; identical to SEQ ID NO: 106561
  misc_feature (1)..(1205): Ceres Seq. ID no. 13619962
  misc_feature (1)..(1205): Ortholog of  Ceres SEQ ID NO 14314939 as cited in SEQ ID NO 58010

SEQ ID NO: 117801 - protein, 282 aa, Arabidopsis thaliana; identical to SEQ ID NO: 106562
  peptide (1)..(282): Ceres Seq. ID no. 13619963

SEQ ID NO: 117802 - protein, 222 aa, Arabidopsis thaliana; identical to SEQ ID NO: 106563
  peptide (1)..(222): Ceres Seq. ID no. 13619964

SEQ ID NO: 117803 - protein, 196 aa, Arabidopsis thaliana; identical to SEQ ID NO: 106564
  peptide (1)..(196): Ceres Seq. ID no. 13619965

SEQ ID NO: 117804 - DNA, 1050 bp, Arabidopsis thaliana; identical to SEQ ID NO: 106565
  misc_feature (1)..(1050): Ceres Seq. ID no. 13619970
  misc_feature (1)..(1050): Ortholog of  Ceres SEQ ID NO 14314550 as cited in SEQ ID NO 52321

SEQ ID NO: 117805 - protein, 317 aa, Arabidopsis thaliana; identical to SEQ ID NO: 106566
  peptide (1)..(317): Ceres Seq. ID no. 13619971

SEQ ID NO: 117806 - protein, 288 aa, Arabidopsis thaliana; identical to SEQ ID NO: 106567
  peptide (1)..(288): Ceres Seq. ID no. 13619972

SEQ ID NO: 117807 - DNA, 723 bp, Arabidopsis thaliana; identical to SEQ ID NO: 106568
  misc_feature (1)..(723): Ceres Seq. ID no. 13619973
  misc_feature (1)..(723): Ortholog of  Ceres SEQ ID NO 12618180 as cited in SEQ ID NO 64539

SEQ ID NO: 117808 - protein, 194 aa, Arabidopsis thaliana; identical to SEQ ID NO: 106569
  peptide (1)..(194): Ceres Seq. ID no. 13619974

SEQ ID NO: 117809 - protein, 168 aa, Arabidopsis thaliana; identical to SEQ ID NO: 106570
  peptide (1)..(168): Ceres Seq. ID no. 13619975

SEQ ID NO: 117810 - protein, 125 aa, Arabidopsis thaliana; identical to SEQ ID NO: 106571
  peptide (1)..(125): Ceres Seq. ID no. 13619976

SEQ ID NO: 117811 - DNA, 962 bp, Arabidopsis thaliana; identical to SEQ ID NO: 106572
  misc_feature (1)..(962): Ceres Seq. ID no. 13619977
  misc_feature (1)..(962): Ortholog of  Ceres SEQ ID NO 13661969 as cited in SEQ ID NO 61215
  misc_feature (1)..(962): Ortholog of  Ceres SEQ ID NO 12614809 as cited in SEQ ID NO 68808
  misc_feature (1)..(962): Ortholog of  Ceres SEQ ID NO 12634366 as cited in SEQ ID NO 0
  misc_feature (1)..(962): Ortholog of  Ceres SEQ ID NO 15175257 as cited in SEQ ID NO 0

SEQ ID NO: 117812 - protein, 255 aa, Arabidopsis thaliana; identical to SEQ ID NO: 106573
  peptide (1)..(255): Ceres Seq. ID no. 13619978

SEQ ID NO: 117813 - protein, 243 aa, Arabidopsis thaliana; identical to SEQ ID NO: 106574
  peptide (1)..(243): Ceres Seq. ID no. 13619979

SEQ ID NO: 117814 - protein, 240 aa, Arabidopsis thaliana; identical to SEQ ID NO: 106575
  peptide (1)..(240): Ceres Seq. ID no. 13619980

SEQ ID NO: 117815 - DNA, 1071 bp, Arabidopsis thaliana; identical to SEQ ID NO: 106576
  misc_feature (1)..(1071): Ceres Seq. ID no. 13619985
  misc_feature (1)..(1071): Ortholog of  Ceres SEQ ID NO 15177654 as cited in SEQ ID NO 59933
  misc_feature (1)..(1071): Ortholog of  Ceres SEQ ID NO 14303600 as cited in SEQ ID NO 64632

SEQ ID NO: 117816 - protein, 305 aa, Arabidopsis thaliana; identical to SEQ ID NO: 39574
  peptide (1)..(305): Ceres Seq. ID no. 13619986

SEQ ID NO: 117817 - protein, 282 aa, Arabidopsis thaliana; identical to SEQ ID NO: 39575
  peptide (1)..(282): Ceres Seq. ID no. 13619987

SEQ ID NO: 117818 - protein, 266 aa, Arabidopsis thaliana; identical to SEQ ID NO: 39576
  peptide (1)..(266): Ceres Seq. ID no. 13619988

SEQ ID NO: 117819 - DNA, 971 bp, Arabidopsis thaliana; identical to SEQ ID NO: 106580
  misc_feature (1)..(971): Ceres Seq. ID no. 13619993
  misc_feature (1)..(971): Ortholog of  Ceres SEQ ID NO 15171228 as cited in SEQ ID NO 56948
  misc_feature (1)..(971): Ortholog of  Ceres SEQ ID NO 13597134 as cited in SEQ ID NO 64501

SEQ ID NO: 117820 - protein, 244 aa, Arabidopsis thaliana; identical to SEQ ID NO: 28288
  peptide (1)..(244): Ceres Seq. ID no. 13619994

SEQ ID NO: 117821 - protein, 194 aa, Arabidopsis thaliana; identical to SEQ ID NO: 28289
  peptide (1)..(194): Ceres Seq. ID no. 13619995

SEQ ID NO: 117822 - DNA, 1575 bp, Arabidopsis thaliana; identical to SEQ ID NO: 106583
  misc_feature (1)..(1575): Ceres Seq. ID no. 13620003
  misc_feature (1)..(1575): Ortholog of  Ceres SEQ ID NO 14307296 as cited in SEQ ID NO 53966
  misc_feature (1)..(1575): Ortholog of  Ceres SEQ ID NO 15175368 as cited in SEQ ID NO 60071
  misc_feature (1)..(1575): Ortholog of  Ceres SEQ ID NO 13528157 as cited in SEQ ID NO 60102
  misc_feature (1)..(1575): Ortholog of  Ceres SEQ ID NO 15225423 as cited in SEQ ID NO 64689

SEQ ID NO: 117823 - protein, 312 aa, Arabidopsis thaliana; identical to SEQ ID NO: 43570
  peptide (1)..(312): Ceres Seq. ID no. 13620004

SEQ ID NO: 117824 - protein, 302 aa, Arabidopsis thaliana; identical to SEQ ID NO: 43571
  peptide (1)..(302): Ceres Seq. ID no. 13620005

SEQ ID NO: 117825 - protein, 285 aa, Arabidopsis thaliana; identical to SEQ ID NO: 43572
  peptide (1)..(285): Ceres Seq. ID no. 13620006

SEQ ID NO: 117826 - DNA, 928 bp, Arabidopsis thaliana; identical to SEQ ID NO: 106587
  misc_feature (1)..(928): Ceres Seq. ID no. 13620007
  misc_feature (1)..(928): Ortholog of  Ceres SEQ ID NO 13638976 as cited in SEQ ID NO 55790
  misc_feature (1)..(928): Ortholog of  Ceres SEQ ID NO 13595442 as cited in SEQ ID NO 56456
  misc_feature (1)..(928): Ortholog of  Ceres SEQ ID NO 12616626 as cited in SEQ ID NO 64532
  misc_feature (1)..(928): Ortholog of  Ceres SEQ ID NO 12635864 as cited in SEQ ID NO 0

SEQ ID NO: 117827 - protein, 204 aa, Arabidopsis thaliana; identical to SEQ ID NO: 28497
  peptide (1)..(204): Ceres Seq. ID no. 13620008

SEQ ID NO: 117828 - protein, 176 aa, Arabidopsis thaliana; identical to SEQ ID NO: 28498
  peptide (1)..(176): Ceres Seq. ID no. 13620009

SEQ ID NO: 117829 - protein, 174 aa, Arabidopsis thaliana; identical to SEQ ID NO: 28499
  peptide (1)..(174): Ceres Seq. ID no. 13620010

SEQ ID NO: 117830 - DNA, 1570 bp, Arabidopsis thaliana; identical to SEQ ID NO: 106591
  misc_feature (1)..(1570): Ceres Seq. ID no. 13620011
  misc_feature (1)..(1570): Ortholog of  Ceres SEQ ID NO 15178236 as cited in SEQ ID NO 67053

SEQ ID NO: 117831 - protein, 425 aa, Arabidopsis thaliana; identical to SEQ ID NO: 106592
  peptide (1)..(425): Ceres Seq. ID no. 13620012

SEQ ID NO: 117832 - protein, 407 aa, Arabidopsis thaliana; identical to SEQ ID NO: 106593
  peptide (1)..(407): Ceres Seq. ID no. 13620013

SEQ ID NO: 117833 - protein, 345 aa, Arabidopsis thaliana; identical to SEQ ID NO: 106594
  peptide (1)..(345): Ceres Seq. ID no. 13620014

SEQ ID NO: 117834 - DNA, 1217 bp, Arabidopsis thaliana; identical to SEQ ID NO: 106595
  misc_feature (1)..(1217): Ceres Seq. ID no. 13620022
  misc_feature (1)..(1217): Ortholog of  Ceres SEQ ID NO 14315275 as cited in SEQ ID NO 52556
  misc_feature (1)..(1217): Ortholog of  Ceres SEQ ID NO 13597260 as cited in SEQ ID NO 63885

SEQ ID NO: 117835 - protein, 363 aa, Arabidopsis thaliana; identical to SEQ ID NO: 106596
  peptide (1)..(363): Ceres Seq. ID no. 13620023

SEQ ID NO: 117836 - protein, 345 aa, Arabidopsis thaliana; identical to SEQ ID NO: 106597
  peptide (1)..(345): Ceres Seq. ID no. 13620024

SEQ ID NO: 117837 - protein, 335 aa, Arabidopsis thaliana; identical to SEQ ID NO: 42965
  peptide (1)..(335): Ceres Seq. ID no. 13620025

SEQ ID NO: 117838 - DNA, 993 bp, Arabidopsis thaliana; identical to SEQ ID NO: 106599
  misc_feature (1)..(993): Ceres Seq. ID no. 13620044
  misc_feature (1)..(993): Ortholog of  Ceres SEQ ID NO 15168573 as cited in SEQ ID NO 57822
  misc_feature (1)..(993): Ortholog of  Ceres SEQ ID NO 12592883 as cited in SEQ ID NO 67862

SEQ ID NO: 117839 - protein, 211 aa, Arabidopsis thaliana; identical to SEQ ID NO: 106600
  peptide (1)..(211): Ceres Seq. ID no. 13620045

SEQ ID NO: 117840 - protein, 198 aa, Arabidopsis thaliana; identical to SEQ ID NO: 106601
  peptide (1)..(198): Ceres Seq. ID no. 13620046

SEQ ID NO: 117841 - protein, 118 aa, Arabidopsis thaliana; identical to SEQ ID NO: 106602
  peptide (1)..(118): Ceres Seq. ID no. 13620047

SEQ ID NO: 117842 - DNA, 1829 bp, Arabidopsis thaliana; identical to SEQ ID NO: 106603
  misc_feature (1)..(1829): Ceres Seq. ID no. 13620048
  misc_feature (1)..(1829): Ortholog of  Ceres SEQ ID NO 12613725 as cited in SEQ ID NO 68196

SEQ ID NO: 117843 - protein, 548 aa, Arabidopsis thaliana; identical to SEQ ID NO: 106604
  peptide (1)..(548): Ceres Seq. ID no. 13620049

SEQ ID NO: 117844 - protein, 523 aa, Arabidopsis thaliana; identical to SEQ ID NO: 106605
  peptide (1)..(523): Ceres Seq. ID no. 13620050

SEQ ID NO: 117845 - protein, 516 aa, Arabidopsis thaliana; identical to SEQ ID NO: 106606
  peptide (1)..(516): Ceres Seq. ID no. 13620051

SEQ ID NO: 117846 - DNA, 771 bp, Arabidopsis thaliana; identical to SEQ ID NO: 106607
  misc_feature (1)..(771): Ceres Seq. ID no. 13620055
  misc_feature (1)..(771): Ortholog of  Ceres SEQ ID NO 14307589 as cited in SEQ ID NO 20466
  misc_feature (1)..(771): Ortholog of  Ceres SEQ ID NO 13584238 as cited in SEQ ID NO 64216
  misc_feature (1)..(771): Ortholog of  Ceres SEQ ID NO 13661001 as cited in SEQ ID NO 67531

SEQ ID NO: 117847 - protein, 256 aa, Arabidopsis thaliana; identical to SEQ ID NO: 106608
  peptide (1)..(256): Ceres Seq. ID no. 13620056

SEQ ID NO: 117848 - protein, 255 aa, Arabidopsis thaliana; identical to SEQ ID NO: 106609
  peptide (1)..(255): Ceres Seq. ID no. 13620057

SEQ ID NO: 117849 - protein, 192 aa, Arabidopsis thaliana; identical to SEQ ID NO: 106610
  peptide (1)..(192): Ceres Seq. ID no. 13620058

SEQ ID NO: 117850 - DNA, 1453 bp, Arabidopsis thaliana; identical to SEQ ID NO: 106611
  misc_feature (1)..(1453): Ceres Seq. ID no. 13620067
  misc_feature (1)..(1453): Ortholog of  Ceres SEQ ID NO 14308851 as cited in SEQ ID NO 55618

SEQ ID NO: 117851 - protein, 377 aa, Arabidopsis thaliana; identical to SEQ ID NO: 106612
  peptide (1)..(377): Ceres Seq. ID no. 13620068

SEQ ID NO: 117852 - protein, 360 aa, Arabidopsis thaliana; identical to SEQ ID NO: 106613
  peptide (1)..(360): Ceres Seq. ID no. 13620069

SEQ ID NO: 117853 - protein, 332 aa, Arabidopsis thaliana; identical to SEQ ID NO: 106614
  peptide (1)..(332): Ceres Seq. ID no. 13620070

SEQ ID NO: 117854 - DNA, 1628 bp, Arabidopsis thaliana; identical to SEQ ID NO: 106615
  misc_feature (1)..(1628): Ceres Seq. ID no. 13620071
  misc_feature (1)..(1628): Ortholog of  Ceres SEQ ID NO 13597843 as cited in SEQ ID NO 64850
  misc_feature (1)..(1628): Ortholog of  Ceres SEQ ID NO 13662880 as cited in SEQ ID NO 65422
  misc_feature (1)..(1628): Ortholog of  Ceres SEQ ID NO 12779098 as cited in SEQ ID NO 67698
  misc_feature (1)..(1628): Ortholog of  Ceres SEQ ID NO 13596180 as cited in SEQ ID NO 67941
  misc_feature (1)..(1628): Ortholog of  Ceres SEQ ID NO 13591190 as cited in SEQ ID NO 68044
  misc_feature (1)..(1628): Ortholog of  Ceres SEQ ID NO 13595961 as cited in SEQ ID NO 68223
  misc_feature (1)..(1628): Ortholog of  Ceres SEQ ID NO 13596089 as cited in SEQ ID NO 68373

SEQ ID NO: 117855 - protein, 452 aa, Arabidopsis thaliana; identical to SEQ ID NO: 106616
  peptide (1)..(452): Ceres Seq. ID no. 13620072

SEQ ID NO: 117856 - protein, 429 aa, Arabidopsis thaliana; identical to SEQ ID NO: 106617
  peptide (1)..(429): Ceres Seq. ID no. 13620073

SEQ ID NO: 117857 - protein, 428 aa, Arabidopsis thaliana; identical to SEQ ID NO: 106618
  peptide (1)..(428): Ceres Seq. ID no. 13620074

SEQ ID NO: 117858 - DNA, 1681 bp, Arabidopsis thaliana; identical to SEQ ID NO: 106619
  misc_feature (1)..(1681): Ceres Seq. ID no. 13620090
  misc_feature (1)..(1681): Ortholog of  Ceres SEQ ID NO 13594380 as cited in SEQ ID NO 58039
  misc_feature (1)..(1681): Ortholog of  Ceres SEQ ID NO 13597407 as cited in SEQ ID NO 64106

SEQ ID NO: 117859 - protein, 527 aa, Arabidopsis thaliana; identical to SEQ ID NO: 106620
  peptide (1)..(527): Ceres Seq. ID no. 13620091

SEQ ID NO: 117860 - protein, 504 aa, Arabidopsis thaliana; identical to SEQ ID NO: 106621
  peptide (1)..(504): Ceres Seq. ID no. 13620092

SEQ ID NO: 117861 - protein, 470 aa, Arabidopsis thaliana; identical to SEQ ID NO: 106622
  peptide (1)..(470): Ceres Seq. ID no. 13620093

SEQ ID NO: 117862 - DNA, 1404 bp, Arabidopsis thaliana; identical to SEQ ID NO: 106623
  misc_feature (1)..(1404): Ceres Seq. ID no. 13620098
  misc_feature (1)..(1404): Ortholog of  Ceres SEQ ID NO 13647016 as cited in SEQ ID NO 20325
  misc_feature (1)..(1404): Ortholog of  Ceres SEQ ID NO 15179824 as cited in SEQ ID NO 66250
  misc_feature (1)..(1404): Ortholog of  Ceres SEQ ID NO 13657872 as cited in SEQ ID NO 66357

SEQ ID NO: 117863 - protein, 398 aa, Arabidopsis thaliana; identical to SEQ ID NO: 106624
  peptide (1)..(398): Ceres Seq. ID no. 13620099

SEQ ID NO: 117864 - protein, 374 aa, Arabidopsis thaliana; identical to SEQ ID NO: 106625
  peptide (1)..(374): Ceres Seq. ID no. 13620100

SEQ ID NO: 117865 - protein, 309 aa, Arabidopsis thaliana; identical to SEQ ID NO: 106626
  peptide (1)..(309): Ceres Seq. ID no. 13620101

SEQ ID NO: 117866 - DNA, 2387 bp, Arabidopsis thaliana; identical to SEQ ID NO: 106627
  misc_feature (1)..(2387): Ceres Seq. ID no. 13620108
  misc_feature (1)..(2387): Ortholog of  Ceres SEQ ID NO 13663839 as cited in SEQ ID NO 60834
  misc_feature (1)..(2387): Ortholog of  Ceres SEQ ID NO 14313284 as cited in SEQ ID NO 67146
  misc_feature (1)..(2387): Ortholog of  Ceres SEQ ID NO 14308925 as cited in SEQ ID NO 0

SEQ ID NO: 117867 - protein, 699 aa, Arabidopsis thaliana; identical to SEQ ID NO: 106628
  peptide (1)..(699): Ceres Seq. ID no. 13620109

SEQ ID NO: 117868 - protein, 615 aa, Arabidopsis thaliana; identical to SEQ ID NO: 106629
  peptide (1)..(615): Ceres Seq. ID no. 13620110

SEQ ID NO: 117869 - protein, 594 aa, Arabidopsis thaliana; identical to SEQ ID NO: 106630
  peptide (1)..(594): Ceres Seq. ID no. 13620111

SEQ ID NO: 117870 - DNA, 1112 bp, Arabidopsis thaliana; identical to SEQ ID NO: 106631
  misc_feature (1)..(1112): Ceres Seq. ID no. 13620120
  misc_feature (1)..(1112): Ortholog of  Ceres SEQ ID NO 14301482 as cited in SEQ ID NO 63355

SEQ ID NO: 117871 - protein, 356 aa, Arabidopsis thaliana; identical to SEQ ID NO: 106632
  peptide (1)..(356): Ceres Seq. ID no. 13620121

SEQ ID NO: 117872 - protein, 259 aa, Arabidopsis thaliana; identical to SEQ ID NO: 106633
  peptide (1)..(259): Ceres Seq. ID no. 13620122

SEQ ID NO: 117873 - protein, 254 aa, Arabidopsis thaliana; identical to SEQ ID NO: 106634
  peptide (1)..(254): Ceres Seq. ID no. 13620123

SEQ ID NO: 117874 - DNA, 1265 bp, Arabidopsis thaliana; identical to SEQ ID NO: 106635
  misc_feature (1)..(1265): Ceres Seq. ID no. 13620124
  misc_feature (1)..(1265): Ortholog of  Ceres SEQ ID NO 13594269 as cited in SEQ ID NO 57656
  misc_feature (1)..(1265): Ortholog of  Ceres SEQ ID NO 12613979 as cited in SEQ ID NO 68579

SEQ ID NO: 117875 - protein, 351 aa, Arabidopsis thaliana; identical to SEQ ID NO: 106636
  peptide (1)..(351): Ceres Seq. ID no. 13620125

SEQ ID NO: 117876 - protein, 343 aa, Arabidopsis thaliana; identical to SEQ ID NO: 106637
  peptide (1)..(343): Ceres Seq. ID no. 13620126

SEQ ID NO: 117877 - protein, 223 aa, Arabidopsis thaliana; identical to SEQ ID NO: 106638
  peptide (1)..(223): Ceres Seq. ID no. 13620127

SEQ ID NO: 117878 - DNA, 1184 bp, Arabidopsis thaliana; identical to SEQ ID NO: 106639
  misc_feature (1)..(1184): Ceres Seq. ID no. 13620131
  misc_feature (1)..(1184): Ortholog of  Ceres SEQ ID NO 14314628 as cited in SEQ ID NO 56888

SEQ ID NO: 117879 - protein, 321 aa, Arabidopsis thaliana; identical to SEQ ID NO: 106640
  peptide (1)..(321): Ceres Seq. ID no. 13620132

SEQ ID NO: 117880 - protein, 302 aa, Arabidopsis thaliana; identical to SEQ ID NO: 106641
  peptide (1)..(302): Ceres Seq. ID no. 13620133

SEQ ID NO: 117881 - protein, 275 aa, Arabidopsis thaliana; identical to SEQ ID NO: 106642
  peptide (1)..(275): Ceres Seq. ID no. 13620134

SEQ ID NO: 117882 - DNA, 1135 bp, Arabidopsis thaliana; identical to SEQ ID NO: 106643
  misc_feature (1)..(1135): Ceres Seq. ID no. 13620135
  misc_feature (1)..(1135): Ortholog of  Ceres SEQ ID NO 12636774 as cited in SEQ ID NO 372
  misc_feature (1)..(1135): Ortholog of  Ceres SEQ ID NO 13582350 as cited in SEQ ID NO 56734
  misc_feature (1)..(1135): Ortholog of  Ceres SEQ ID NO 12476493 as cited in SEQ ID NO 58163
  misc_feature (1)..(1135): Ortholog of  Ceres SEQ ID NO 12615466 as cited in SEQ ID NO 62761
  misc_feature (1)..(1135): Ortholog of  Ceres SEQ ID NO 13597295 as cited in SEQ ID NO 63743
  misc_feature (1)..(1135): Ortholog of  Ceres SEQ ID NO 12617090 as cited in SEQ ID NO 64005
  misc_feature (1)..(1135): Ortholog of  Ceres SEQ ID NO 13597439 as cited in SEQ ID NO 64081
  misc_feature (1)..(1135): Ortholog of  Ceres SEQ ID NO 13597233 as cited in SEQ ID NO 64370
  misc_feature (1)..(1135): Ortholog of  Ceres SEQ ID NO 13599438 as cited in SEQ ID NO 0

SEQ ID NO: 117883 - protein, 250 aa, Arabidopsis thaliana; identical to SEQ ID NO: 106644
  peptide (1)..(250): Ceres Seq. ID no. 13620136

SEQ ID NO: 117884 - protein, 236 aa, Arabidopsis thaliana; identical to SEQ ID NO: 106645
  peptide (1)..(236): Ceres Seq. ID no. 13620137

SEQ ID NO: 117885 - protein, 196 aa, Arabidopsis thaliana; identical to SEQ ID NO: 106646
  peptide (1)..(196): Ceres Seq. ID no. 13620138

SEQ ID NO: 117886 - DNA, 2688 bp, Arabidopsis thaliana; identical to SEQ ID NO: 106647
  misc_feature (1)..(2688): Ceres Seq. ID no. 13620143
  misc_feature (1)..(2688): Ortholog of  Ceres SEQ ID NO 12609770 as cited in SEQ ID NO 51477
  misc_feature (1)..(2688): Ortholog of  Ceres SEQ ID NO 15177764 as cited in SEQ ID NO 57561

SEQ ID NO: 117887 - protein, 133 aa, Arabidopsis thaliana; identical to SEQ ID NO: 29634
  peptide (1)..(133): Ceres Seq. ID no. 13620144

SEQ ID NO: 117888 - protein, 94 aa, Arabidopsis thaliana; identical to SEQ ID NO: 29635
  peptide (1)..(94): Ceres Seq. ID no. 13620145

SEQ ID NO: 117889 - protein, 76 aa, Arabidopsis thaliana; identical to SEQ ID NO: 29636
  peptide (1)..(76): Ceres Seq. ID no. 13620146

SEQ ID NO: 117890 - DNA, 1107 bp, Arabidopsis thaliana; identical to SEQ ID NO: 106651
  misc_feature (1)..(1107): Ceres Seq. ID no. 13620150
  misc_feature (1)..(1107): Ortholog of  Ceres SEQ ID NO 13594298 as cited in SEQ ID NO 57803
  misc_feature (1)..(1107): Ortholog of  Ceres SEQ ID NO 13503476 as cited in SEQ ID NO 61978
  misc_feature (1)..(1107): Ortholog of  Ceres SEQ ID NO 12578438 as cited in SEQ ID NO 62201
  misc_feature (1)..(1107): Ortholog of  Ceres SEQ ID NO 12617675 as cited in SEQ ID NO 64656

SEQ ID NO: 117891 - protein, 305 aa, Arabidopsis thaliana; identical to SEQ ID NO: 27882
  peptide (1)..(305): Ceres Seq. ID no. 13620151

SEQ ID NO: 117892 - protein, 292 aa, Arabidopsis thaliana; identical to SEQ ID NO: 27883
  peptide (1)..(292): Ceres Seq. ID no. 13620152

SEQ ID NO: 117893 - protein, 285 aa, Arabidopsis thaliana; identical to SEQ ID NO: 27884
  peptide (1)..(285): Ceres Seq. ID no. 13620153

SEQ ID NO: 117894 - DNA, 1811 bp, Arabidopsis thaliana; identical to SEQ ID NO: 106655
  misc_feature (1)..(1811): Ceres Seq. ID no. 13620154
  misc_feature (1)..(1811): Ortholog of  Ceres SEQ ID NO 14311219 as cited in SEQ ID NO 56635
  misc_feature (1)..(1811): Ortholog of  Ceres SEQ ID NO 15169615 as cited in SEQ ID NO 66708
  misc_feature (1)..(1811): Ortholog of  Ceres SEQ ID NO 15169619 as cited in SEQ ID NO 67512

SEQ ID NO: 117895 - protein, 488 aa, Arabidopsis thaliana; identical to SEQ ID NO: 39837
  peptide (1)..(488): Ceres Seq. ID no. 13620155

SEQ ID NO: 117896 - protein, 426 aa, Arabidopsis thaliana; identical to SEQ ID NO: 39838
  peptide (1)..(426): Ceres Seq. ID no. 13620156

SEQ ID NO: 117897 - protein, 337 aa, Arabidopsis thaliana; identical to SEQ ID NO: 39839
  peptide (1)..(337): Ceres Seq. ID no. 13620157

SEQ ID NO: 117898 - DNA, 1096 bp, Arabidopsis thaliana; identical to SEQ ID NO: 106659
  misc_feature (1)..(1096): Ceres Seq. ID no. 13620158
  misc_feature (1)..(1096): Ortholog of  Ceres SEQ ID NO 13595341 as cited in SEQ ID NO 56398
  misc_feature (1)..(1096): Ortholog of  Ceres SEQ ID NO 15173764 as cited in SEQ ID NO 57550
  misc_feature (1)..(1096): Ortholog of  Ceres SEQ ID NO 15227118 as cited in SEQ ID NO 59038
  misc_feature (1)..(1096): Ortholog of  Ceres SEQ ID NO 13597299 as cited in SEQ ID NO 63785
  misc_feature (1)..(1096): Ortholog of  Ceres SEQ ID NO 13663895 as cited in SEQ ID NO 66923

SEQ ID NO: 117899 - protein, 228 aa, Arabidopsis thaliana; identical to SEQ ID NO: 106660
  peptide (1)..(228): Ceres Seq. ID no. 13620159

SEQ ID NO: 117900 - protein, 212 aa, Arabidopsis thaliana; identical to SEQ ID NO: 106661
  peptide (1)..(212): Ceres Seq. ID no. 13620160

SEQ ID NO: 117901 - protein, 198 aa, Arabidopsis thaliana; identical to SEQ ID NO: 106662
  peptide (1)..(198): Ceres Seq. ID no. 13620161

SEQ ID NO: 117902 - DNA, 1007 bp, Arabidopsis thaliana; identical to SEQ ID NO: 106663
  misc_feature (1)..(1007): Ceres Seq. ID no. 13620162
  misc_feature (1)..(1007): Ortholog of  Ceres SEQ ID NO 14310748 as cited in SEQ ID NO 53379
  misc_feature (1)..(1007): Ortholog of  Ceres SEQ ID NO 15179906 as cited in SEQ ID NO 67006

SEQ ID NO: 117903 - protein, 218 aa, Arabidopsis thaliana; identical to SEQ ID NO: 25673
  peptide (1)..(218): Ceres Seq. ID no. 13620163

SEQ ID NO: 117904 - protein, 215 aa, Arabidopsis thaliana; identical to SEQ ID NO: 25674
  peptide (1)..(215): Ceres Seq. ID no. 13620164

SEQ ID NO: 117905 - protein, 188 aa, Arabidopsis thaliana; identical to SEQ ID NO: 25675
  peptide (1)..(188): Ceres Seq. ID no. 13620165

SEQ ID NO: 117906 - DNA, 749 bp, Arabidopsis thaliana; identical to SEQ ID NO: 106667
  misc_feature (1)..(749): Ceres Seq. ID no. 13620169
  misc_feature (1)..(749): Ortholog of  Ceres SEQ ID NO 15172691 as cited in SEQ ID NO 56148
  misc_feature (1)..(749): Ortholog of  Ceres SEQ ID NO 15226850 as cited in SEQ ID NO 62501

SEQ ID NO: 117907 - protein, 148 aa, Arabidopsis thaliana; identical to SEQ ID NO: 24638
  peptide (1)..(148): Ceres Seq. ID no. 13620170

SEQ ID NO: 117908 - protein, 135 aa, Arabidopsis thaliana; identical to SEQ ID NO: 24639
  peptide (1)..(135): Ceres Seq. ID no. 13620171

SEQ ID NO: 117909 - protein, 130 aa, Arabidopsis thaliana; identical to SEQ ID NO: 24640
  peptide (1)..(130): Ceres Seq. ID no. 13620172

SEQ ID NO: 117910 - DNA, 835 bp, Arabidopsis thaliana; identical to SEQ ID NO: 106671
  misc_feature (1)..(835): Ceres Seq. ID no. 13620173
  misc_feature (1)..(835): Ortholog of  Ceres SEQ ID NO 15172970 as cited in SEQ ID NO 51736
  misc_feature (1)..(835): Ortholog of  Ceres SEQ ID NO 13598157 as cited in SEQ ID NO 61570
  misc_feature (1)..(835): Ortholog of  Ceres SEQ ID NO 15173774 as cited in SEQ ID NO 61771
  misc_feature (1)..(835): Ortholog of  Ceres SEQ ID NO 15175549 as cited in SEQ ID NO 0

SEQ ID NO: 117911 - protein, 137 aa, Arabidopsis thaliana; identical to SEQ ID NO: 20894
  peptide (1)..(137): Ceres Seq. ID no. 13620174

SEQ ID NO: 117912 - DNA, 1621 bp, Arabidopsis thaliana; identical to SEQ ID NO: 106673
  misc_feature (1)..(1621): Ceres Seq. ID no. 13620179
  misc_feature (1)..(1621): Ortholog of  Ceres SEQ ID NO 13594209 as cited in SEQ ID NO 59089
  misc_feature (1)..(1621): Ortholog of  Ceres SEQ ID NO 14308007 as cited in SEQ ID NO 65760
  misc_feature (1)..(1621): Ortholog of  Ceres SEQ ID NO 13502874 as cited in SEQ ID NO 66298
  misc_feature (1)..(1621): Ortholog of  Ceres SEQ ID NO 12614124 as cited in SEQ ID NO 68392

SEQ ID NO: 117913 - protein, 384 aa, Arabidopsis thaliana; identical to SEQ ID NO: 106674
  peptide (1)..(384): Ceres Seq. ID no. 13620180

SEQ ID NO: 117914 - protein, 226 aa, Arabidopsis thaliana; identical to SEQ ID NO: 106675
  peptide (1)..(226): Ceres Seq. ID no. 13620181

SEQ ID NO: 117915 - protein, 212 aa, Arabidopsis thaliana; identical to SEQ ID NO: 106676
  peptide (1)..(212): Ceres Seq. ID no. 13620182

SEQ ID NO: 117916 - DNA, 4068 bp, Arabidopsis thaliana; identical to SEQ ID NO: 106677
  misc_feature (1)..(4068): Ceres Seq. ID no. 13620187
  misc_feature (1)..(4068): Ortholog of  Ceres SEQ ID NO 13600310 as cited in SEQ ID NO 5086

SEQ ID NO: 117917 - protein, 1259 aa, Arabidopsis thaliana; identical to SEQ ID NO: 106678
  peptide (1)..(1259): Ceres Seq. ID no. 13620188

SEQ ID NO: 117918 - protein, 1180 aa, Arabidopsis thaliana; identical to SEQ ID NO: 106679
  peptide (1)..(1180): Ceres Seq. ID no. 13620189

SEQ ID NO: 117919 - protein, 1148 aa, Arabidopsis thaliana; identical to SEQ ID NO: 106680
  peptide (1)..(1148): Ceres Seq. ID no. 13620190

SEQ ID NO: 117920 - DNA, 932 bp, Arabidopsis thaliana; identical to SEQ ID NO: 106681
  misc_feature (1)..(932): Ceres Seq. ID no. 13620191
  misc_feature (1)..(932): Ortholog of  Ceres SEQ ID NO 13582624 as cited in SEQ ID NO 56287
  misc_feature (1)..(932): Ortholog of  Ceres SEQ ID NO 13597264 as cited in SEQ ID NO 63897
  misc_feature (1)..(932): Ortholog of  Ceres SEQ ID NO 13656452 as cited in SEQ ID NO 65745

SEQ ID NO: 117921 - protein, 219 aa, Arabidopsis thaliana; identical to SEQ ID NO: 106682
  peptide (1)..(219): Ceres Seq. ID no. 13620192

SEQ ID NO: 117922 - protein, 214 aa, Arabidopsis thaliana; identical to SEQ ID NO: 106683
  peptide (1)..(214): Ceres Seq. ID no. 13620193

SEQ ID NO: 117923 - protein, 132 aa, Arabidopsis thaliana; identical to SEQ ID NO: 106684
  peptide (1)..(132): Ceres Seq. ID no. 13620194

SEQ ID NO: 117924 - DNA, 3220 bp, Arabidopsis thaliana; identical to SEQ ID NO: 106685
  misc_feature (1)..(3220): Ceres Seq. ID no. 13620199
  misc_feature (1)..(3220): Ortholog of  Ceres SEQ ID NO 13646569 as cited in SEQ ID NO 20745

SEQ ID NO: 117925 - protein, 960 aa, Arabidopsis thaliana; identical to SEQ ID NO: 106686
  peptide (1)..(960): Ceres Seq. ID no. 13620200

SEQ ID NO: 117926 - protein, 888 aa, Arabidopsis thaliana; identical to SEQ ID NO: 106687
  peptide (1)..(888): Ceres Seq. ID no. 13620201

SEQ ID NO: 117927 - protein, 880 aa, Arabidopsis thaliana; identical to SEQ ID NO: 106688
  peptide (1)..(880): Ceres Seq. ID no. 13620202

SEQ ID NO: 117928 - DNA, 1775 bp, Arabidopsis thaliana; identical to SEQ ID NO: 106689
  misc_feature (1)..(1775): Ceres Seq. ID no. 13620206
  misc_feature (1)..(1775): Ortholog of  Ceres SEQ ID NO 12610323 as cited in SEQ ID NO 56055

SEQ ID NO: 117929 - protein, 403 aa, Arabidopsis thaliana; identical to SEQ ID NO: 106690
  peptide (1)..(403): Ceres Seq. ID no. 13620207

SEQ ID NO: 117930 - protein, 347 aa, Arabidopsis thaliana; identical to SEQ ID NO: 106691
  peptide (1)..(347): Ceres Seq. ID no. 13620208

SEQ ID NO: 117931 - DNA, 1253 bp, Arabidopsis thaliana; identical to SEQ ID NO: 106692
  misc_feature (1)..(1253): Ceres Seq. ID no. 13620213
  misc_feature (1)..(1253): Ortholog of  Ceres SEQ ID NO 12583469 as cited in SEQ ID NO 51031
  misc_feature (1)..(1253): Ortholog of  Ceres SEQ ID NO 13597389 as cited in SEQ ID NO 63426
  misc_feature (1)..(1253): Ortholog of  Ceres SEQ ID NO 13595998 as cited in SEQ ID NO 68161

SEQ ID NO: 117932 - protein, 398 aa, Arabidopsis thaliana; identical to SEQ ID NO: 106693
  peptide (1)..(398): Ceres Seq. ID no. 13620214

SEQ ID NO: 117933 - protein, 381 aa, Arabidopsis thaliana; identical to SEQ ID NO: 106694
  peptide (1)..(381): Ceres Seq. ID no. 13620215

SEQ ID NO: 117934 - protein, 311 aa, Arabidopsis thaliana; identical to SEQ ID NO: 106695
  peptide (1)..(311): Ceres Seq. ID no. 13620216

SEQ ID NO: 117935 - DNA, 1031 bp, Arabidopsis thaliana; identical to SEQ ID NO: 106696
  misc_feature (1)..(1031): Ceres Seq. ID no. 13620217
  misc_feature (1)..(1031): Ortholog of  Ceres SEQ ID NO 14315275 as cited in SEQ ID NO 52556
  misc_feature (1)..(1031): Ortholog of  Ceres SEQ ID NO 13597260 as cited in SEQ ID NO 63885

SEQ ID NO: 117936 - protein, 308 aa, Arabidopsis thaliana; identical to SEQ ID NO: 106697
  peptide (1)..(308): Ceres Seq. ID no. 13620218

SEQ ID NO: 117937 - protein, 185 aa, Arabidopsis thaliana; identical to SEQ ID NO: 88970
  peptide (1)..(185): Ceres Seq. ID no. 13620219

SEQ ID NO: 117938 - DNA, 3146 bp, Arabidopsis thaliana; identical to SEQ ID NO: 106699
  misc_feature (1)..(3146): Ceres Seq. ID no. 13620220
  misc_feature (1)..(3146): Ortholog of  Ceres SEQ ID NO 14306557 as cited in SEQ ID NO 53442

SEQ ID NO: 117939 - protein, 920 aa, Arabidopsis thaliana; identical to SEQ ID NO: 105909
  peptide (1)..(920): Ceres Seq. ID no. 13620221

SEQ ID NO: 117940 - protein, 872 aa, Arabidopsis thaliana; identical to SEQ ID NO: 105910
  peptide (1)..(872): Ceres Seq. ID no. 13620222

SEQ ID NO: 117941 - protein, 842 aa, Arabidopsis thaliana; identical to SEQ ID NO: 105911
  peptide (1)..(842): Ceres Seq. ID no. 13620223

SEQ ID NO: 117942 - DNA, 1587 bp, Arabidopsis thaliana; identical to SEQ ID NO: 106703
  misc_feature (1)..(1587): Ceres Seq. ID no. 13620224
  misc_feature (1)..(1587): Ortholog of  Ceres SEQ ID NO 14313743 as cited in SEQ ID NO 59555

SEQ ID NO: 117943 - protein, 496 aa, Arabidopsis thaliana; identical to SEQ ID NO: 106704
  peptide (1)..(496): Ceres Seq. ID no. 13620225

SEQ ID NO: 117944 - protein, 450 aa, Arabidopsis thaliana; identical to SEQ ID NO: 106705
  peptide (1)..(450): Ceres Seq. ID no. 13620226

SEQ ID NO: 117945 - protein, 431 aa, Arabidopsis thaliana; identical to SEQ ID NO: 106706
  peptide (1)..(431): Ceres Seq. ID no. 13620227

SEQ ID NO: 117946 - DNA, 945 bp, Arabidopsis thaliana; identical to SEQ ID NO: 106707
  misc_feature (1)..(945): Ceres Seq. ID no. 13620228
  misc_feature (1)..(945): Ortholog of  Ceres SEQ ID NO 15169786 as cited in SEQ ID NO 59711

SEQ ID NO: 117947 - protein, 210 aa, Arabidopsis thaliana; identical to SEQ ID NO: 106708
  peptide (1)..(210): Ceres Seq. ID no. 13620229

SEQ ID NO: 117948 - protein, 148 aa, Arabidopsis thaliana; identical to SEQ ID NO: 106709
  peptide (1)..(148): Ceres Seq. ID no. 13620230

SEQ ID NO: 117949 - DNA, 1220 bp, Arabidopsis thaliana; identical to SEQ ID NO: 106710
  misc_feature (1)..(1220): Ceres Seq. ID no. 13620255
  misc_feature (1)..(1220): Ortholog of  Ceres SEQ ID NO 12364737 as cited in SEQ ID NO 51089
  misc_feature (1)..(1220): Ortholog of  Ceres SEQ ID NO 14311515 as cited in SEQ ID NO 51680
  misc_feature (1)..(1220): Ortholog of  Ceres SEQ ID NO 13595567 as cited in SEQ ID NO 56760
  misc_feature (1)..(1220): Ortholog of  Ceres SEQ ID NO 13655302 as cited in SEQ ID NO 63307
  misc_feature (1)..(1220): Ortholog of  Ceres SEQ ID NO 13597380 as cited in SEQ ID NO 64054
  misc_feature (1)..(1220): Ortholog of  Ceres SEQ ID NO 12625474 as cited in SEQ ID NO 64169
  misc_feature (1)..(1220): Ortholog of  Ceres SEQ ID NO 13597502 as cited in SEQ ID NO 64681
  misc_feature (1)..(1220): Ortholog of  Ceres SEQ ID NO 15180805 as cited in SEQ ID NO 0

SEQ ID NO: 117950 - protein, 376 aa, Arabidopsis thaliana; identical to SEQ ID NO: 106711
  peptide (1)..(376): Ceres Seq. ID no. 13620256

SEQ ID NO: 117951 - protein, 374 aa, Arabidopsis thaliana; identical to SEQ ID NO: 106712
  peptide (1)..(374): Ceres Seq. ID no. 13620257

SEQ ID NO: 117952 - protein, 367 aa, Arabidopsis thaliana; identical to SEQ ID NO: 106713
  peptide (1)..(367): Ceres Seq. ID no. 13620258

SEQ ID NO: 117953 - DNA, 2851 bp, Arabidopsis thaliana; identical to SEQ ID NO: 106714
  misc_feature (1)..(2851): Ceres Seq. ID no. 13620267
  misc_feature (1)..(2851): Ortholog of  Ceres SEQ ID NO 15180432 as cited in SEQ ID NO 0

SEQ ID NO: 117954 - protein, 752 aa, Arabidopsis thaliana; identical to SEQ ID NO: 30478
  peptide (1)..(752): Ceres Seq. ID no. 13620268

SEQ ID NO: 117955 - protein, 751 aa, Arabidopsis thaliana; identical to SEQ ID NO: 30479
  peptide (1)..(751): Ceres Seq. ID no. 13620269

SEQ ID NO: 117956 - protein, 701 aa, Arabidopsis thaliana; identical to SEQ ID NO: 30480
  peptide (1)..(701): Ceres Seq. ID no. 13620270

SEQ ID NO: 117957 - DNA, 1801 bp, Arabidopsis thaliana; identical to SEQ ID NO: 106718
  misc_feature (1)..(1801): Ceres Seq. ID no. 13620271
  misc_feature (1)..(1801): Ortholog of  Ceres SEQ ID NO 15177258 as cited in SEQ ID NO 51386

SEQ ID NO: 117958 - protein, 529 aa, Arabidopsis thaliana; identical to SEQ ID NO: 106719
  peptide (1)..(529): Ceres Seq. ID no. 13620272

SEQ ID NO: 117959 - protein, 512 aa, Arabidopsis thaliana; identical to SEQ ID NO: 106720
  peptide (1)..(512): Ceres Seq. ID no. 13620273

SEQ ID NO: 117960 - protein, 441 aa, Arabidopsis thaliana; identical to SEQ ID NO: 106721
  peptide (1)..(441): Ceres Seq. ID no. 13620274

SEQ ID NO: 117961 - DNA, 1649 bp, Arabidopsis thaliana; identical to SEQ ID NO: 106722
  misc_feature (1)..(1649): Ceres Seq. ID no. 13620283
  misc_feature (1)..(1649): Ortholog of  Ceres SEQ ID NO 14311313 as cited in SEQ ID NO 53503
  misc_feature (1)..(1649): Ortholog of  Ceres SEQ ID NO 14311625 as cited in SEQ ID NO 55184
  misc_feature (1)..(1649): Ortholog of  Ceres SEQ ID NO 14310588 as cited in SEQ ID NO 58770

SEQ ID NO: 117962 - protein, 479 aa, Arabidopsis thaliana; identical to SEQ ID NO: 106723
  peptide (1)..(479): Ceres Seq. ID no. 13620284

SEQ ID NO: 117963 - protein, 370 aa, Arabidopsis thaliana; identical to SEQ ID NO: 106724
  peptide (1)..(370): Ceres Seq. ID no. 13620285

SEQ ID NO: 117964 - protein, 365 aa, Arabidopsis thaliana; identical to SEQ ID NO: 106725
  peptide (1)..(365): Ceres Seq. ID no. 13620286

SEQ ID NO: 117965 - DNA, 1440 bp, Arabidopsis thaliana; identical to SEQ ID NO: 106726
  misc_feature (1)..(1440): Ceres Seq. ID no. 13620294
  misc_feature (1)..(1440): Ortholog of  Ceres SEQ ID NO 14311136 as cited in SEQ ID NO 56694

SEQ ID NO: 117966 - protein, 399 aa, Arabidopsis thaliana; identical to SEQ ID NO: 106727
  peptide (1)..(399): Ceres Seq. ID no. 13620295

SEQ ID NO: 117967 - protein, 386 aa, Arabidopsis thaliana; identical to SEQ ID NO: 106728
  peptide (1)..(386): Ceres Seq. ID no. 13620296

SEQ ID NO: 117968 - protein, 319 aa, Arabidopsis thaliana; identical to SEQ ID NO: 106729
  peptide (1)..(319): Ceres Seq. ID no. 13620297

SEQ ID NO: 117969 - DNA, 1756 bp, Arabidopsis thaliana; identical to SEQ ID NO: 106730
  misc_feature (1)..(1756): Ceres Seq. ID no. 13620306
  misc_feature (1)..(1756): Ortholog of  Ceres SEQ ID NO 15168464 as cited in SEQ ID NO 59187
  misc_feature (1)..(1756): Ortholog of  Ceres SEQ ID NO 15171618 as cited in SEQ ID NO 59968

SEQ ID NO: 117970 - protein, 513 aa, Arabidopsis thaliana; identical to SEQ ID NO: 106731
  peptide (1)..(513): Ceres Seq. ID no. 13620307

SEQ ID NO: 117971 - protein, 466 aa, Arabidopsis thaliana; identical to SEQ ID NO: 106732
  peptide (1)..(466): Ceres Seq. ID no. 13620308

SEQ ID NO: 117972 - protein, 385 aa, Arabidopsis thaliana; identical to SEQ ID NO: 106733
  peptide (1)..(385): Ceres Seq. ID no. 13620309

SEQ ID NO: 117973 - DNA, 1657 bp, Arabidopsis thaliana; identical to SEQ ID NO: 106734
  misc_feature (1)..(1657): Ceres Seq. ID no. 13620323
  misc_feature (1)..(1657): Ortholog of  Ceres SEQ ID NO 14315418 as cited in SEQ ID NO 57506

SEQ ID NO: 117974 - protein, 428 aa, Arabidopsis thaliana; identical to SEQ ID NO: 106735
  peptide (1)..(428): Ceres Seq. ID no. 13620324

SEQ ID NO: 117975 - protein, 286 aa, Arabidopsis thaliana; identical to SEQ ID NO: 106736
  peptide (1)..(286): Ceres Seq. ID no. 13620325

SEQ ID NO: 117976 - protein, 274 aa, Arabidopsis thaliana; identical to SEQ ID NO: 106737
  peptide (1)..(274): Ceres Seq. ID no. 13620326

SEQ ID NO: 117977 - DNA, 1725 bp, Arabidopsis thaliana; identical to SEQ ID NO: 106738
  misc_feature (1)..(1725): Ceres Seq. ID no. 13620334
  misc_feature (1)..(1725): Ortholog of  Ceres SEQ ID NO 13657138 as cited in SEQ ID NO 65923
  misc_feature (1)..(1725): Ortholog of  Ceres SEQ ID NO 13584744 as cited in SEQ ID NO 69137

SEQ ID NO: 117978 - protein, 456 aa, Arabidopsis thaliana; identical to SEQ ID NO: 106739
  peptide (1)..(456): Ceres Seq. ID no. 13620335

SEQ ID NO: 117979 - protein, 451 aa, Arabidopsis thaliana; identical to SEQ ID NO: 106740
  peptide (1)..(451): Ceres Seq. ID no. 13620336

SEQ ID NO: 117980 - protein, 418 aa, Arabidopsis thaliana; identical to SEQ ID NO: 106741
  peptide (1)..(418): Ceres Seq. ID no. 13620337

SEQ ID NO: 117981 - DNA, 1524 bp, Arabidopsis thaliana; identical to SEQ ID NO: 106742
  misc_feature (1)..(1524): Ceres Seq. ID no. 13620338
  misc_feature (1)..(1524): Ortholog of  Ceres SEQ ID NO 13582281 as cited in SEQ ID NO 51014
  misc_feature (1)..(1524): Ortholog of  Ceres SEQ ID NO 14315606 as cited in SEQ ID NO 53515
  misc_feature (1)..(1524): Ortholog of  Ceres SEQ ID NO 12617417 as cited in SEQ ID NO 65089

SEQ ID NO: 117982 - protein, 471 aa, Arabidopsis thaliana; identical to SEQ ID NO: 106743
  peptide (1)..(471): Ceres Seq. ID no. 13620339

SEQ ID NO: 117983 - protein, 466 aa, Arabidopsis thaliana; identical to SEQ ID NO: 106744
  peptide (1)..(466): Ceres Seq. ID no. 13620340

SEQ ID NO: 117984 - protein, 446 aa, Arabidopsis thaliana; identical to SEQ ID NO: 106745
  peptide (1)..(446): Ceres Seq. ID no. 13620341

SEQ ID NO: 117985 - DNA, 1464 bp, Arabidopsis thaliana; identical to SEQ ID NO: 106746
  misc_feature (1)..(1464): Ceres Seq. ID no. 13620342
  misc_feature (1)..(1464): Ortholog of  Ceres SEQ ID NO 14304969 as cited in SEQ ID NO 53193
  misc_feature (1)..(1464): Ortholog of  Ceres SEQ ID NO 14314851 as cited in SEQ ID NO 54014
  misc_feature (1)..(1464): Ortholog of  Ceres SEQ ID NO 14307442 as cited in SEQ ID NO 54239
  misc_feature (1)..(1464): Ortholog of  Ceres SEQ ID NO 15227214 as cited in SEQ ID NO 55368
  misc_feature (1)..(1464): Ortholog of  Ceres SEQ ID NO 13638897 as cited in SEQ ID NO 55839
  misc_feature (1)..(1464): Ortholog of  Ceres SEQ ID NO 14302561 as cited in SEQ ID NO 56543
  misc_feature (1)..(1464): Ortholog of  Ceres SEQ ID NO 15177710 as cited in SEQ ID NO 59217
  misc_feature (1)..(1464): Ortholog of  Ceres SEQ ID NO 15173484 as cited in SEQ ID NO 61804
  misc_feature (1)..(1464): Ortholog of  Ceres SEQ ID NO 13596958 as cited in SEQ ID NO 63319
  misc_feature (1)..(1464): Ortholog of  Ceres SEQ ID NO 12614573 as cited in SEQ ID NO 68344
  misc_feature (1)..(1464): Ortholog of  Ceres SEQ ID NO 12614814 as cited in SEQ ID NO 68816
  misc_feature (1)..(1464): Ortholog of  Ceres SEQ ID NO 13624040 as cited in SEQ ID NO 0

SEQ ID NO: 117986 - protein, 338 aa, Arabidopsis thaliana; identical to SEQ ID NO: 21776
  peptide (1)..(338): Ceres Seq. ID no. 13620343

SEQ ID NO: 117987 - protein, 212 aa, Arabidopsis thaliana; identical to SEQ ID NO: 21777
  peptide (1)..(212): Ceres Seq. ID no. 13620344

SEQ ID NO: 117988 - protein, 195 aa, Arabidopsis thaliana; identical to SEQ ID NO: 21778
  peptide (1)..(195): Ceres Seq. ID no. 13620345

SEQ ID NO: 117989 - DNA, 1148 bp, Arabidopsis thaliana; identical to SEQ ID NO: 106750
  misc_feature (1)..(1148): Ceres Seq. ID no. 13620354
  misc_feature (1)..(1148): Ortholog of  Ceres SEQ ID NO 15227018 as cited in SEQ ID NO 0

SEQ ID NO: 117990 - protein, 331 aa, Arabidopsis thaliana; identical to SEQ ID NO: 106751
  peptide (1)..(331): Ceres Seq. ID no. 13620355

SEQ ID NO: 117991 - protein, 324 aa, Arabidopsis thaliana; identical to SEQ ID NO: 106752
  peptide (1)..(324): Ceres Seq. ID no. 13620356

SEQ ID NO: 117992 - protein, 264 aa, Arabidopsis thaliana; identical to SEQ ID NO: 106753
  peptide (1)..(264): Ceres Seq. ID no. 13620357

SEQ ID NO: 117993 - DNA, 1512 bp, Arabidopsis thaliana; identical to SEQ ID NO: 106754
  misc_feature (1)..(1512): Ceres Seq. ID no. 13620358
  misc_feature (1)..(1512): Ortholog of  Ceres SEQ ID NO 14315626 as cited in SEQ ID NO 52943
  misc_feature (1)..(1512): Ortholog of  Ceres SEQ ID NO 14302742 as cited in SEQ ID NO 66899
  misc_feature (1)..(1512): Ortholog of  Ceres SEQ ID NO 14313536 as cited in SEQ ID NO 67925

SEQ ID NO: 117994 - protein, 435 aa, Arabidopsis thaliana; identical to SEQ ID NO: 106755
  peptide (1)..(435): Ceres Seq. ID no. 13620359

SEQ ID NO: 117995 - protein, 405 aa, Arabidopsis thaliana; identical to SEQ ID NO: 21464
  peptide (1)..(405): Ceres Seq. ID no. 13620360

SEQ ID NO: 117996 - protein, 404 aa, Arabidopsis thaliana; identical to SEQ ID NO: 21465
  peptide (1)..(404): Ceres Seq. ID no. 13620361

SEQ ID NO: 117997 - DNA, 2355 bp, Arabidopsis thaliana; identical to SEQ ID NO: 106758
  misc_feature (1)..(2355): Ceres Seq. ID no. 13620366
  misc_feature (1)..(2355): Ortholog of  Ceres SEQ ID NO 12617323 as cited in SEQ ID NO 64129

SEQ ID NO: 117998 - protein, 202 aa, Arabidopsis thaliana; identical to SEQ ID NO: 106759
  peptide (1)..(202): Ceres Seq. ID no. 13620367

SEQ ID NO: 117999 - protein, 127 aa, Arabidopsis thaliana; identical to SEQ ID NO: 106760
  peptide (1)..(127): Ceres Seq. ID no. 13620368

SEQ ID NO: 118000 - protein, 116 aa, Arabidopsis thaliana; identical to SEQ ID NO: 106761
  peptide (1)..(116): Ceres Seq. ID no. 13620369

SEQ ID NO: 118001 - DNA, 1589 bp, Arabidopsis thaliana; identical to SEQ ID NO: 106762
  misc_feature (1)..(1589): Ceres Seq. ID no. 13620374
  misc_feature (1)..(1589): Ortholog of  Ceres SEQ ID NO 14315862 as cited in SEQ ID NO 60207
  misc_feature (1)..(1589): Ortholog of  Ceres SEQ ID NO 13660129 as cited in SEQ ID NO 67547

SEQ ID NO: 118002 - protein, 414 aa, Arabidopsis thaliana; identical to SEQ ID NO: 106763
  peptide (1)..(414): Ceres Seq. ID no. 13620375

SEQ ID NO: 118003 - protein, 367 aa, Arabidopsis thaliana; identical to SEQ ID NO: 106764
  peptide (1)..(367): Ceres Seq. ID no. 13620376

SEQ ID NO: 118004 - protein, 321 aa, Arabidopsis thaliana; identical to SEQ ID NO: 106765
  peptide (1)..(321): Ceres Seq. ID no. 13620377

SEQ ID NO: 118005 - DNA, 1638 bp, Arabidopsis thaliana; identical to SEQ ID NO: 106766
  misc_feature (1)..(1638): Ceres Seq. ID no. 13620378
  misc_feature (1)..(1638): Ortholog of  Ceres SEQ ID NO 13594209 as cited in SEQ ID NO 59089
  misc_feature (1)..(1638): Ortholog of  Ceres SEQ ID NO 15169611 as cited in SEQ ID NO 65939
  misc_feature (1)..(1638): Ortholog of  Ceres SEQ ID NO 14307960 as cited in SEQ ID NO 66187
  misc_feature (1)..(1638): Ortholog of  Ceres SEQ ID NO 13502874 as cited in SEQ ID NO 66298
  misc_feature (1)..(1638): Ortholog of  Ceres SEQ ID NO 12614124 as cited in SEQ ID NO 68392
  misc_feature (1)..(1638): Ortholog of  Ceres SEQ ID NO 14308011 as cited in SEQ ID NO 69234

SEQ ID NO: 118006 - protein, 512 aa, Arabidopsis thaliana; identical to SEQ ID NO: 106767
  peptide (1)..(512): Ceres Seq. ID no. 13620379

SEQ ID NO: 118007 - protein, 507 aa, Arabidopsis thaliana; identical to SEQ ID NO: 106768
  peptide (1)..(507): Ceres Seq. ID no. 13620380

SEQ ID NO: 118008 - protein, 500 aa, Arabidopsis thaliana; identical to SEQ ID NO: 106769
  peptide (1)..(500): Ceres Seq. ID no. 13620381

SEQ ID NO: 118009 - DNA, 1364 bp, Arabidopsis thaliana; identical to SEQ ID NO: 106770
  misc_feature (1)..(1364): Ceres Seq. ID no. 13620394
  misc_feature (1)..(1364): Ortholog of  Ceres SEQ ID NO 14304273 as cited in SEQ ID NO 53621
  misc_feature (1)..(1364): Ortholog of  Ceres SEQ ID NO 13595438 as cited in SEQ ID NO 56490
  misc_feature (1)..(1364): Ortholog of  Ceres SEQ ID NO 14314104 as cited in SEQ ID NO 63109

SEQ ID NO: 118010 - protein, 343 aa, Arabidopsis thaliana; identical to SEQ ID NO: 106771
  peptide (1)..(343): Ceres Seq. ID no. 13620395

SEQ ID NO: 118011 - DNA, 811 bp, Arabidopsis thaliana; identical to SEQ ID NO: 106772
  misc_feature (1)..(811): Ceres Seq. ID no. 13620396
  misc_feature (1)..(811): Ortholog of  Ceres SEQ ID NO 15173146 as cited in SEQ ID NO 61836
  misc_feature (1)..(811): Ortholog of  Ceres SEQ ID NO 14309121 as cited in SEQ ID NO 0

SEQ ID NO: 118012 - protein, 157 aa, Arabidopsis thaliana; identical to SEQ ID NO: 29363
  peptide (1)..(157): Ceres Seq. ID no. 13620397

SEQ ID NO: 118013 - protein, 144 aa, Arabidopsis thaliana; identical to SEQ ID NO: 29364
  peptide (1)..(144): Ceres Seq. ID no. 13620398

SEQ ID NO: 118014 - protein, 136 aa, Arabidopsis thaliana; identical to SEQ ID NO: 29365
  peptide (1)..(136): Ceres Seq. ID no. 13620399

SEQ ID NO: 118015 - DNA, 1282 bp, Arabidopsis thaliana; identical to SEQ ID NO: 106776
  misc_feature (1)..(1282): Ceres Seq. ID no. 13620419
  misc_feature (1)..(1282): Ortholog of  Ceres SEQ ID NO 15171634 as cited in SEQ ID NO 57593
  misc_feature (1)..(1282): Ortholog of  Ceres SEQ ID NO 14301936 as cited in SEQ ID NO 67361

SEQ ID NO: 118016 - protein, 288 aa, Arabidopsis thaliana; identical to SEQ ID NO: 43586
  peptide (1)..(288): Ceres Seq. ID no. 13620420

SEQ ID NO: 118017 - protein, 177 aa, Arabidopsis thaliana; identical to SEQ ID NO: 43587
  peptide (1)..(177): Ceres Seq. ID no. 13620421

SEQ ID NO: 118018 - DNA, 1160 bp, Arabidopsis thaliana; identical to SEQ ID NO: 106779
  misc_feature (1)..(1160): Ceres Seq. ID no. 13620422
  misc_feature (1)..(1160): Ortholog of  Ceres SEQ ID NO 13594740 as cited in SEQ ID NO 51721
  misc_feature (1)..(1160): Ortholog of  Ceres SEQ ID NO 14316497 as cited in SEQ ID NO 58285
  misc_feature (1)..(1160): Ortholog of  Ceres SEQ ID NO 13595944 as cited in SEQ ID NO 68153

SEQ ID NO: 118019 - protein, 339 aa, Arabidopsis thaliana; identical to SEQ ID NO: 106780
  peptide (1)..(339): Ceres Seq. ID no. 13620423

SEQ ID NO: 118020 - protein, 328 aa, Arabidopsis thaliana; identical to SEQ ID NO: 106781
  peptide (1)..(328): Ceres Seq. ID no. 13620424

SEQ ID NO: 118021 - protein, 326 aa, Arabidopsis thaliana; identical to SEQ ID NO: 106782
  peptide (1)..(326): Ceres Seq. ID no. 13620425

SEQ ID NO: 118022 - DNA, 1305 bp, Arabidopsis thaliana; identical to SEQ ID NO: 106783
  misc_feature (1)..(1305): Ceres Seq. ID no. 13620442
  misc_feature (1)..(1305): Ortholog of  Ceres SEQ ID NO 12611392 as cited in SEQ ID NO 56826
  misc_feature (1)..(1305): Ortholog of  Ceres SEQ ID NO 13660872 as cited in SEQ ID NO 60830
  misc_feature (1)..(1305): Ortholog of  Ceres SEQ ID NO 12616221 as cited in SEQ ID NO 63291

SEQ ID NO: 118023 - protein, 379 aa, Arabidopsis thaliana; identical to SEQ ID NO: 106784
  peptide (1)..(379): Ceres Seq. ID no. 13620443

SEQ ID NO: 118024 - protein, 367 aa, Arabidopsis thaliana; identical to SEQ ID NO: 106785
  peptide (1)..(367): Ceres Seq. ID no. 13620444

SEQ ID NO: 118025 - protein, 330 aa, Arabidopsis thaliana; identical to SEQ ID NO: 106786
  peptide (1)..(330): Ceres Seq. ID no. 13620445

SEQ ID NO: 118026 - DNA, 2107 bp, Arabidopsis thaliana; identical to SEQ ID NO: 106787
  misc_feature (1)..(2107): Ceres Seq. ID no. 13620453
  misc_feature (1)..(2107): Ortholog of  Ceres SEQ ID NO 13657677 as cited in SEQ ID NO 66119

SEQ ID NO: 118027 - protein, 642 aa, Arabidopsis thaliana; identical to SEQ ID NO: 106788
  peptide (1)..(642): Ceres Seq. ID no. 13620454

SEQ ID NO: 118028 - protein, 641 aa, Arabidopsis thaliana; identical to SEQ ID NO: 106789
  peptide (1)..(641): Ceres Seq. ID no. 13620455

SEQ ID NO: 118029 - protein, 608 aa, Arabidopsis thaliana; identical to SEQ ID NO: 106790
  peptide (1)..(608): Ceres Seq. ID no. 13620456

SEQ ID NO: 118030 - DNA, 1570 bp, Arabidopsis thaliana; identical to SEQ ID NO: 106791
  misc_feature (1)..(1570): Ceres Seq. ID no. 13620461
  misc_feature (1)..(1570): Ortholog of  Ceres SEQ ID NO 13598313 as cited in SEQ ID NO 68293

SEQ ID NO: 118031 - protein, 387 aa, Arabidopsis thaliana; identical to SEQ ID NO: 106792
  peptide (1)..(387): Ceres Seq. ID no. 13620462

SEQ ID NO: 118032 - protein, 322 aa, Arabidopsis thaliana; identical to SEQ ID NO: 106793
  peptide (1)..(322): Ceres Seq. ID no. 13620463

SEQ ID NO: 118033 - DNA, 1456 bp, Arabidopsis thaliana; identical to SEQ ID NO: 106794
  misc_feature (1)..(1456): Ceres Seq. ID no. 13620464
  misc_feature (1)..(1456): Ortholog of  Ceres SEQ ID NO 13593955 as cited in SEQ ID NO 54278
  misc_feature (1)..(1456): Ortholog of  Ceres SEQ ID NO 14314092 as cited in SEQ ID NO 62788
  misc_feature (1)..(1456): Ortholog of  Ceres SEQ ID NO 13597380 as cited in SEQ ID NO 64054
  misc_feature (1)..(1456): Ortholog of  Ceres SEQ ID NO 12625474 as cited in SEQ ID NO 64169
  misc_feature (1)..(1456): Ortholog of  Ceres SEQ ID NO 13597502 as cited in SEQ ID NO 64681

SEQ ID NO: 118034 - protein, 353 aa, Arabidopsis thaliana; identical to SEQ ID NO: 106795
  peptide (1)..(353): Ceres Seq. ID no. 13620465

SEQ ID NO: 118035 - protein, 322 aa, Arabidopsis thaliana; identical to SEQ ID NO: 21577
  peptide (1)..(322): Ceres Seq. ID no. 13620466

SEQ ID NO: 118036 - DNA, 1460 bp, Arabidopsis thaliana; identical to SEQ ID NO: 106797
  misc_feature (1)..(1460): Ceres Seq. ID no. 13620474
  misc_feature (1)..(1460): Ortholog of  Ceres SEQ ID NO 15179290 as cited in SEQ ID NO 0

SEQ ID NO: 118037 - protein, 432 aa, Arabidopsis thaliana; identical to SEQ ID NO: 106798
  peptide (1)..(432): Ceres Seq. ID no. 13620475

SEQ ID NO: 118038 - protein, 332 aa, Arabidopsis thaliana; identical to SEQ ID NO: 106799
  peptide (1)..(332): Ceres Seq. ID no. 13620476

SEQ ID NO: 118039 - protein, 245 aa, Arabidopsis thaliana; identical to SEQ ID NO: 106800
  peptide (1)..(245): Ceres Seq. ID no. 13620477

SEQ ID NO: 118040 - DNA, 1546 bp, Arabidopsis thaliana; identical to SEQ ID NO: 106801
  misc_feature (1)..(1546): Ceres Seq. ID no. 13620482
  misc_feature (1)..(1546): Ortholog of  Ceres SEQ ID NO 13663419 as cited in SEQ ID NO 66561

SEQ ID NO: 118041 - protein, 448 aa, Arabidopsis thaliana; identical to SEQ ID NO: 106802
  peptide (1)..(448): Ceres Seq. ID no. 15219358

SEQ ID NO: 118042 - protein, 441 aa, Arabidopsis thaliana; identical to SEQ ID NO: 106803
  peptide (1)..(441): Ceres Seq. ID no. 15219359

SEQ ID NO: 118043 - protein, 339 aa, Arabidopsis thaliana; identical to SEQ ID NO: 106804
  peptide (1)..(339): Ceres Seq. ID no. 15219360

SEQ ID NO: 118044 - DNA, 1722 bp, Arabidopsis thaliana; identical to SEQ ID NO: 106805
  misc_feature (1)..(1722): Ceres Seq. ID no. 13620491
  misc_feature (1)..(1722): Ortholog of  Ceres SEQ ID NO 12582229 as cited in SEQ ID NO 58499

SEQ ID NO: 118045 - protein, 399 aa, Arabidopsis thaliana; identical to SEQ ID NO: 106806
  peptide (1)..(399): Ceres Seq. ID no. 13620492

SEQ ID NO: 118046 - protein, 339 aa, Arabidopsis thaliana; identical to SEQ ID NO: 106807
  peptide (1)..(339): Ceres Seq. ID no. 13620493

SEQ ID NO: 118047 - protein, 312 aa, Arabidopsis thaliana; identical to SEQ ID NO: 106808
  peptide (1)..(312): Ceres Seq. ID no. 13620494

SEQ ID NO: 118048 - DNA, 1541 bp, Arabidopsis thaliana; identical to SEQ ID NO: 106809
  misc_feature (1)..(1541): Ceres Seq. ID no. 13620499
  misc_feature (1)..(1541): Ortholog of  Ceres SEQ ID NO 15180156 as cited in SEQ ID NO 0

SEQ ID NO: 118049 - protein, 460 aa, Arabidopsis thaliana; identical to SEQ ID NO: 106810
  peptide (1)..(460): Ceres Seq. ID no. 13620500

SEQ ID NO: 118050 - protein, 401 aa, Arabidopsis thaliana; identical to SEQ ID NO: 106811
  peptide (1)..(401): Ceres Seq. ID no. 13620501

SEQ ID NO: 118051 - protein, 378 aa, Arabidopsis thaliana; identical to SEQ ID NO: 106812
  peptide (1)..(378): Ceres Seq. ID no. 13620502

SEQ ID NO: 118052 - DNA, 2171 bp, Arabidopsis thaliana; identical to SEQ ID NO: 106813
  misc_feature (1)..(2171): Ceres Seq. ID no. 13620515
  misc_feature (1)..(2171): Ortholog of  Ceres SEQ ID NO 12586556 as cited in SEQ ID NO 64667
  misc_feature (1)..(2171): Ortholog of  Ceres SEQ ID NO 13660894 as cited in SEQ ID NO 67475

SEQ ID NO: 118053 - protein, 639 aa, Arabidopsis thaliana; identical to SEQ ID NO: 106814
  peptide (1)..(639): Ceres Seq. ID no. 13620516

SEQ ID NO: 118054 - protein, 630 aa, Arabidopsis thaliana; identical to SEQ ID NO: 106815
  peptide (1)..(630): Ceres Seq. ID no. 13620517

SEQ ID NO: 118055 - protein, 626 aa, Arabidopsis thaliana; identical to SEQ ID NO: 106816
  peptide (1)..(626): Ceres Seq. ID no. 13620518

SEQ ID NO: 118056 - DNA, 1271 bp, Arabidopsis thaliana; identical to SEQ ID NO: 106817
  misc_feature (1)..(1271): Ceres Seq. ID no. 13620539
  misc_feature (1)..(1271): Ortholog of  Ceres SEQ ID NO 13656783 as cited in SEQ ID NO 69218

SEQ ID NO: 118057 - protein, 319 aa, Arabidopsis thaliana; identical to SEQ ID NO: 106818
  peptide (1)..(319): Ceres Seq. ID no. 13620540

SEQ ID NO: 118058 - protein, 274 aa, Arabidopsis thaliana; identical to SEQ ID NO: 106819
  peptide (1)..(274): Ceres Seq. ID no. 13620541

SEQ ID NO: 118059 - protein, 183 aa, Arabidopsis thaliana; identical to SEQ ID NO: 106820
  peptide (1)..(183): Ceres Seq. ID no. 13620542

SEQ ID NO: 118060 - DNA, 1484 bp, Arabidopsis thaliana; identical to SEQ ID NO: 106821
  misc_feature (1)..(1484): Ceres Seq. ID no. 13620555
  misc_feature (1)..(1484): Ortholog of  Ceres SEQ ID NO 13594128 as cited in SEQ ID NO 58608
  misc_feature (1)..(1484): Ortholog of  Ceres SEQ ID NO 14309682 as cited in SEQ ID NO 58908
  misc_feature (1)..(1484): Ortholog of  Ceres SEQ ID NO 12624849 as cited in SEQ ID NO 62773

SEQ ID NO: 118061 - protein, 393 aa, Arabidopsis thaliana; identical to SEQ ID NO: 37473
  peptide (1)..(393): Ceres Seq. ID no. 13620556

SEQ ID NO: 118062 - protein, 324 aa, Arabidopsis thaliana; identical to SEQ ID NO: 37474
  peptide (1)..(324): Ceres Seq. ID no. 13620557

SEQ ID NO: 118063 - protein, 321 aa, Arabidopsis thaliana; identical to SEQ ID NO: 37475
  peptide (1)..(321): Ceres Seq. ID no. 13620558

SEQ ID NO: 118064 - DNA, 1420 bp, Arabidopsis thaliana; identical to SEQ ID NO: 106825
  misc_feature (1)..(1420): Ceres Seq. ID no. 13620559
  misc_feature (1)..(1420): Ortholog of  Ceres SEQ ID NO 13663942 as cited in SEQ ID NO 67573

SEQ ID NO: 118065 - protein, 266 aa, Arabidopsis thaliana; identical to SEQ ID NO: 106826
  peptide (1)..(266): Ceres Seq. ID no. 13620560

SEQ ID NO: 118066 - DNA, 1773 bp, Arabidopsis thaliana; identical to SEQ ID NO: 106827
  misc_feature (1)..(1773): Ceres Seq. ID no. 13620576
  misc_feature (1)..(1773): Ortholog of  Ceres SEQ ID NO 13600220 as cited in SEQ ID NO 0

SEQ ID NO: 118067 - protein, 510 aa, Arabidopsis thaliana; identical to SEQ ID NO: 106828
  peptide (1)..(510): Ceres Seq. ID no. 13620577

SEQ ID NO: 118068 - protein, 503 aa, Arabidopsis thaliana; identical to SEQ ID NO: 106829
  peptide (1)..(503): Ceres Seq. ID no. 13620578

SEQ ID NO: 118069 - protein, 501 aa, Arabidopsis thaliana; identical to SEQ ID NO: 106830
  peptide (1)..(501): Ceres Seq. ID no. 13620579

SEQ ID NO: 118070 - DNA, 1153 bp, Arabidopsis thaliana; identical to SEQ ID NO: 106831
  misc_feature (1)..(1153): Ceres Seq. ID no. 13620580
  misc_feature (1)..(1153): Ortholog of  Ceres SEQ ID NO 14306066 as cited in SEQ ID NO 57378

SEQ ID NO: 118071 - protein, 303 aa, Arabidopsis thaliana; identical to SEQ ID NO: 106832
  peptide (1)..(303): Ceres Seq. ID no. 13620581

SEQ ID NO: 118072 - protein, 268 aa, Arabidopsis thaliana; identical to SEQ ID NO: 42414
  peptide (1)..(268): Ceres Seq. ID no. 13620582

SEQ ID NO: 118073 - protein, 253 aa, Arabidopsis thaliana; identical to SEQ ID NO: 42415
  peptide (1)..(253): Ceres Seq. ID no. 13620583

SEQ ID NO: 118074 - DNA, 1393 bp, Arabidopsis thaliana; identical to SEQ ID NO: 106835
  misc_feature (1)..(1393): Ceres Seq. ID no. 13620591
  misc_feature (1)..(1393): Ortholog of  Ceres SEQ ID NO 13654928 as cited in SEQ ID NO 62546

SEQ ID NO: 118075 - protein, 393 aa, Arabidopsis thaliana; identical to SEQ ID NO: 24209
  peptide (1)..(393): Ceres Seq. ID no. 13620592

SEQ ID NO: 118076 - protein, 389 aa, Arabidopsis thaliana; identical to SEQ ID NO: 24210
  peptide (1)..(389): Ceres Seq. ID no. 13620593

SEQ ID NO: 118077 - protein, 376 aa, Arabidopsis thaliana; identical to SEQ ID NO: 24211
  peptide (1)..(376): Ceres Seq. ID no. 13620594

SEQ ID NO: 118078 - DNA, 904 bp, Arabidopsis thaliana; identical to SEQ ID NO: 106839
  misc_feature (1)..(904): Ceres Seq. ID no. 13620595
  misc_feature (1)..(904): Ortholog of  Ceres SEQ ID NO 12611884 as cited in SEQ ID NO 51018
  misc_feature (1)..(904): Ortholog of  Ceres SEQ ID NO 12609093 as cited in SEQ ID NO 52008
  misc_feature (1)..(904): Ortholog of  Ceres SEQ ID NO 12609839 as cited in SEQ ID NO 52022
  misc_feature (1)..(904): Ortholog of  Ceres SEQ ID NO 13638885 as cited in SEQ ID NO 55803
  misc_feature (1)..(904): Ortholog of  Ceres SEQ ID NO 12615635 as cited in SEQ ID NO 63133
  misc_feature (1)..(904): Ortholog of  Ceres SEQ ID NO 12586351 as cited in SEQ ID NO 64028
  misc_feature (1)..(904): Ortholog of  Ceres SEQ ID NO 13584899 as cited in SEQ ID NO 64830
  misc_feature (1)..(904): Ortholog of  Ceres SEQ ID NO 13654441 as cited in SEQ ID NO 67814
  misc_feature (1)..(904): Ortholog of  Ceres SEQ ID NO 12585194 as cited in SEQ ID NO 68878
  misc_feature (1)..(904): Ortholog of  Ceres SEQ ID NO 12589186 as cited in SEQ ID NO 0
  misc_feature (1)..(904): Ortholog of  Ceres SEQ ID NO 12635608 as cited in SEQ ID NO 0

SEQ ID NO: 118079 - protein, 227 aa, Arabidopsis thaliana; identical to SEQ ID NO: 106840
  peptide (1)..(227): Ceres Seq. ID no. 13620596

SEQ ID NO: 118080 - DNA, 1446 bp, Arabidopsis thaliana; identical to SEQ ID NO: 106841
  misc_feature (1)..(1446): Ceres Seq. ID no. 13650727
  misc_feature (1)..(1446): Ortholog of  Ceres SEQ ID NO 13656435 as cited in SEQ ID NO 65853

SEQ ID NO: 118081 - protein, 67 aa, Arabidopsis thaliana; identical to SEQ ID NO: 250
  peptide (1)..(67): Ceres Seq. ID no. 13650728

SEQ ID NO: 118082 - protein, 42 aa, Arabidopsis thaliana; identical to SEQ ID NO: 106843
  peptide (1)..(42): Ceres Seq. ID no. 13650729

SEQ ID NO: 118083 - protein, 35 aa, Arabidopsis thaliana; identical to SEQ ID NO: 69360
  peptide (1)..(35): Ceres Seq. ID no. 13650730

SEQ ID NO: 118084 - DNA, 645 bp, Arabidopsis thaliana; identical to SEQ ID NO: 106845
  misc_feature (1)..(645): Ceres Seq. ID no. 13620618
  misc_feature (1)..(645): Ortholog of  Ceres SEQ ID NO 14305939 as cited in SEQ ID NO 0

SEQ ID NO: 118085 - protein, 175 aa, Arabidopsis thaliana; identical to SEQ ID NO: 106846
  peptide (1)..(175): Ceres Seq. ID no. 13620619

SEQ ID NO: 118086 - protein, 137 aa, Arabidopsis thaliana; identical to SEQ ID NO: 106847
  peptide (1)..(137): Ceres Seq. ID no. 13620620

SEQ ID NO: 118087 - protein, 109 aa, Arabidopsis thaliana; identical to SEQ ID NO: 106848
  peptide (1)..(109): Ceres Seq. ID no. 13620621

SEQ ID NO: 118088 - DNA, 2837 bp, Arabidopsis thaliana; identical to SEQ ID NO: 106849
  misc_feature (1)..(2837): Ceres Seq. ID no. 13620637
  misc_feature (1)..(2837): Ortholog of  Ceres SEQ ID NO 12586556 as cited in SEQ ID NO 64667
  misc_feature (1)..(2837): Ortholog of  Ceres SEQ ID NO 13660894 as cited in SEQ ID NO 67475

SEQ ID NO: 118089 - protein, 885 aa, Arabidopsis thaliana; identical to SEQ ID NO: 106850
  peptide (1)..(885): Ceres Seq. ID no. 13620638

SEQ ID NO: 118090 - protein, 882 aa, Arabidopsis thaliana; identical to SEQ ID NO: 106851
  peptide (1)..(882): Ceres Seq. ID no. 13620639

SEQ ID NO: 118091 - protein, 759 aa, Arabidopsis thaliana; identical to SEQ ID NO: 106852
  peptide (1)..(759): Ceres Seq. ID no. 13620640

SEQ ID NO: 118092 - DNA, 1483 bp, Arabidopsis thaliana; identical to SEQ ID NO: 106853
  misc_feature (1)..(1483): Ceres Seq. ID no. 13620652
  misc_feature (1)..(1483): Ortholog of  Ceres SEQ ID NO 13599568 as cited in SEQ ID NO 509
  misc_feature (1)..(1483): Ortholog of  Ceres SEQ ID NO 13638595 as cited in SEQ ID NO 52050
  misc_feature (1)..(1483): Ortholog of  Ceres SEQ ID NO 13594748 as cited in SEQ ID NO 52114
  misc_feature (1)..(1483): Ortholog of  Ceres SEQ ID NO 12616101 as cited in SEQ ID NO 63367
  misc_feature (1)..(1483): Ortholog of  Ceres SEQ ID NO 12583993 as cited in SEQ ID NO 68098
  misc_feature (1)..(1483): Ortholog of  Ceres SEQ ID NO 13654535 as cited in SEQ ID NO 68227

SEQ ID NO: 118093 - protein, 235 aa, Arabidopsis thaliana; identical to SEQ ID NO: 106854
  peptide (1)..(235): Ceres Seq. ID no. 13620653

SEQ ID NO: 118094 - protein, 222 aa, Arabidopsis thaliana; identical to SEQ ID NO: 106855
  peptide (1)..(222): Ceres Seq. ID no. 13620654

SEQ ID NO: 118095 - DNA, 825 bp, Arabidopsis thaliana; identical to SEQ ID NO: 106856
  misc_feature (1)..(825): Ceres Seq. ID no. 13620655
  misc_feature (1)..(825): Ortholog of  Ceres SEQ ID NO 15172903 as cited in SEQ ID NO 51839
  misc_feature (1)..(825): Ortholog of  Ceres SEQ ID NO 15177108 as cited in SEQ ID NO 52015
  misc_feature (1)..(825): Ortholog of  Ceres SEQ ID NO 13638595 as cited in SEQ ID NO 52050
  misc_feature (1)..(825): Ortholog of  Ceres SEQ ID NO 13594748 as cited in SEQ ID NO 52114
  misc_feature (1)..(825): Ortholog of  Ceres SEQ ID NO 15173596 as cited in SEQ ID NO 63267
  misc_feature (1)..(825): Ortholog of  Ceres SEQ ID NO 12583993 as cited in SEQ ID NO 68098
  misc_feature (1)..(825): Ortholog of  Ceres SEQ ID NO 13654535 as cited in SEQ ID NO 68227

SEQ ID NO: 118096 - protein, 231 aa, Arabidopsis thaliana; identical to SEQ ID NO: 106857
  peptide (1)..(231): Ceres Seq. ID no. 13620656

SEQ ID NO: 118097 - protein, 227 aa, Arabidopsis thaliana; identical to SEQ ID NO: 106858
  peptide (1)..(227): Ceres Seq. ID no. 13620657

SEQ ID NO: 118098 - protein, 226 aa, Arabidopsis thaliana; identical to SEQ ID NO: 106859
  peptide (1)..(226): Ceres Seq. ID no. 13620658

SEQ ID NO: 118099 - DNA, 1438 bp, Arabidopsis thaliana; identical to SEQ ID NO: 106860
  misc_feature (1)..(1438): Ceres Seq. ID no. 13620680
  misc_feature (1)..(1438): Ortholog of  Ceres SEQ ID NO 15171297 as cited in SEQ ID NO 51458

SEQ ID NO: 118100 - protein, 335 aa, Arabidopsis thaliana; identical to SEQ ID NO: 21341
  peptide (1)..(335): Ceres Seq. ID no. 13620681

SEQ ID NO: 118101 - protein, 318 aa, Arabidopsis thaliana; identical to SEQ ID NO: 21342
  peptide (1)..(318): Ceres Seq. ID no. 13620682

SEQ ID NO: 118102 - protein, 239 aa, Arabidopsis thaliana; identical to SEQ ID NO: 21343
  peptide (1)..(239): Ceres Seq. ID no. 13620683

SEQ ID NO: 118103 - DNA, 887 bp, Arabidopsis thaliana; identical to SEQ ID NO: 106864
  misc_feature (1)..(887): Ceres Seq. ID no. 13620691
  misc_feature (1)..(887): Ortholog of  Ceres SEQ ID NO 12611141 as cited in SEQ ID NO 55992

SEQ ID NO: 118104 - protein, 228 aa, Arabidopsis thaliana; identical to SEQ ID NO: 106865
  peptide (1)..(228): Ceres Seq. ID no. 13620692

SEQ ID NO: 118105 - protein, 218 aa, Arabidopsis thaliana; identical to SEQ ID NO: 106866
  peptide (1)..(218): Ceres Seq. ID no. 13620693

SEQ ID NO: 118106 - protein, 194 aa, Arabidopsis thaliana; identical to SEQ ID NO: 106867
  peptide (1)..(194): Ceres Seq. ID no. 13620694

SEQ ID NO: 118107 - DNA, 2745 bp, Arabidopsis thaliana; identical to SEQ ID NO: 106868
  misc_feature (1)..(2745): Ceres Seq. ID no. 13620713
  misc_feature (1)..(2745): Ortholog of  Ceres SEQ ID NO 15174591 as cited in SEQ ID NO 53383

SEQ ID NO: 118108 - protein, 603 aa, Arabidopsis thaliana; identical to SEQ ID NO: 106869
  peptide (1)..(603): Ceres Seq. ID no. 13620714

SEQ ID NO: 118109 - protein, 452 aa, Arabidopsis thaliana; identical to SEQ ID NO: 106870
  peptide (1)..(452): Ceres Seq. ID no. 13620715

SEQ ID NO: 118110 - protein, 447 aa, Arabidopsis thaliana; identical to SEQ ID NO: 106871
  peptide (1)..(447): Ceres Seq. ID no. 13620716

SEQ ID NO: 118111 - DNA, 2012 bp, Arabidopsis thaliana; identical to SEQ ID NO: 106872
  misc_feature (1)..(2012): Ceres Seq. ID no. 13620721
  misc_feature (1)..(2012): Ortholog of  Ceres SEQ ID NO 13654605 as cited in SEQ ID NO 68732

SEQ ID NO: 118112 - protein, 598 aa, Arabidopsis thaliana; identical to SEQ ID NO: 106873
  peptide (1)..(598): Ceres Seq. ID no. 13620722

SEQ ID NO: 118113 - protein, 554 aa, Arabidopsis thaliana; identical to SEQ ID NO: 72338
  peptide (1)..(554): Ceres Seq. ID no. 13620723

SEQ ID NO: 118114 - protein, 457 aa, Arabidopsis thaliana; identical to SEQ ID NO: 72339
  peptide (1)..(457): Ceres Seq. ID no. 13620724

SEQ ID NO: 118115 - DNA, 1598 bp, Arabidopsis thaliana; identical to SEQ ID NO: 106876
  misc_feature (1)..(1598): Ceres Seq. ID no. 13620729
  misc_feature (1)..(1598): Ortholog of  Ceres SEQ ID NO 13657170 as cited in SEQ ID NO 65651
  misc_feature (1)..(1598): Ortholog of  Ceres SEQ ID NO 12586854 as cited in SEQ ID NO 69102

SEQ ID NO: 118116 - protein, 330 aa, Arabidopsis thaliana; identical to SEQ ID NO: 106877
  peptide (1)..(330): Ceres Seq. ID no. 13620730

SEQ ID NO: 118117 - protein, 208 aa, Arabidopsis thaliana; identical to SEQ ID NO: 106878
  peptide (1)..(208): Ceres Seq. ID no. 13620731

SEQ ID NO: 118118 - protein, 172 aa, Arabidopsis thaliana; identical to SEQ ID NO: 43625
  peptide (1)..(172): Ceres Seq. ID no. 13620732

SEQ ID NO: 118119 - DNA, 1147 bp, Arabidopsis thaliana; identical to SEQ ID NO: 106880
  misc_feature (1)..(1147): Ceres Seq. ID no. 13620741
  misc_feature (1)..(1147): Ortholog of  Ceres SEQ ID NO 14314550 as cited in SEQ ID NO 52321

SEQ ID NO: 118120 - protein, 291 aa, Arabidopsis thaliana; identical to SEQ ID NO: 21663
  peptide (1)..(291): Ceres Seq. ID no. 13620742

SEQ ID NO: 118121 - protein, 157 aa, Arabidopsis thaliana; identical to SEQ ID NO: 21664
  peptide (1)..(157): Ceres Seq. ID no. 13620743

SEQ ID NO: 118122 - DNA, 890 bp, Arabidopsis thaliana; identical to SEQ ID NO: 106883
  misc_feature (1)..(890): Ceres Seq. ID no. 13620744
  misc_feature (1)..(890): Ortholog of  Ceres SEQ ID NO 15178924 as cited in SEQ ID NO 1050
  misc_feature (1)..(890): Ortholog of  Ceres SEQ ID NO 13661768 as cited in SEQ ID NO 61427

SEQ ID NO: 118123 - protein, 295 aa, Arabidopsis thaliana; identical to SEQ ID NO: 106884
  peptide (1)..(295): Ceres Seq. ID no. 13620745

SEQ ID NO: 118124 - protein, 278 aa, Arabidopsis thaliana; identical to SEQ ID NO: 106885
  peptide (1)..(278): Ceres Seq. ID no. 13620746

SEQ ID NO: 118125 - protein, 195 aa, Arabidopsis thaliana; identical to SEQ ID NO: 106886
  peptide (1)..(195): Ceres Seq. ID no. 13620747

SEQ ID NO: 118126 - DNA, 925 bp, Arabidopsis thaliana; identical to SEQ ID NO: 106887
  misc_feature (1)..(925): Ceres Seq. ID no. 13620748
  misc_feature (1)..(925): Ortholog of  Ceres SEQ ID NO 14311773 as cited in SEQ ID NO 59245
  misc_feature (1)..(925): Ortholog of  Ceres SEQ ID NO 15225880 as cited in SEQ ID NO 0

SEQ ID NO: 118127 - protein, 262 aa, Arabidopsis thaliana; identical to SEQ ID NO: 106888
  peptide (1)..(262): Ceres Seq. ID no. 13620749

SEQ ID NO: 118128 - protein, 225 aa, Arabidopsis thaliana; identical to SEQ ID NO: 106889
  peptide (1)..(225): Ceres Seq. ID no. 13620750

SEQ ID NO: 118129 - protein, 224 aa, Arabidopsis thaliana; identical to SEQ ID NO: 106890
  peptide (1)..(224): Ceres Seq. ID no. 13620751

SEQ ID NO: 118130 - DNA, 2411 bp, Arabidopsis thaliana; identical to SEQ ID NO: 106891
  misc_feature (1)..(2411): Ceres Seq. ID no. 13620770
  misc_feature (1)..(2411): Ortholog of  Ceres SEQ ID NO 13594037 as cited in SEQ ID NO 55666
  misc_feature (1)..(2411): Ortholog of  Ceres SEQ ID NO 13657707 as cited in SEQ ID NO 66407

SEQ ID NO: 118131 - protein, 669 aa, Arabidopsis thaliana; identical to SEQ ID NO: 106892
  peptide (1)..(669): Ceres Seq. ID no. 13620771

SEQ ID NO: 118132 - protein, 642 aa, Arabidopsis thaliana; identical to SEQ ID NO: 106893
  peptide (1)..(642): Ceres Seq. ID no. 13620772

SEQ ID NO: 118133 - protein, 584 aa, Arabidopsis thaliana; identical to SEQ ID NO: 106894
  peptide (1)..(584): Ceres Seq. ID no. 13620773

SEQ ID NO: 118134 - DNA, 1229 bp, Arabidopsis thaliana; identical to SEQ ID NO: 106895
  misc_feature (1)..(1229): Ceres Seq. ID no. 13620793
  misc_feature (1)..(1229): Ortholog of  Ceres SEQ ID NO 13594298 as cited in SEQ ID NO 57803
  misc_feature (1)..(1229): Ortholog of  Ceres SEQ ID NO 13503476 as cited in SEQ ID NO 61978
  misc_feature (1)..(1229): Ortholog of  Ceres SEQ ID NO 12578438 as cited in SEQ ID NO 62201
  misc_feature (1)..(1229): Ortholog of  Ceres SEQ ID NO 12617675 as cited in SEQ ID NO 64656

SEQ ID NO: 118135 - protein, 299 aa, Arabidopsis thaliana; identical to SEQ ID NO: 106896
  peptide (1)..(299): Ceres Seq. ID no. 13620794

SEQ ID NO: 118136 - protein, 216 aa, Arabidopsis thaliana; identical to SEQ ID NO: 106897
  peptide (1)..(216): Ceres Seq. ID no. 13620795

SEQ ID NO: 118137 - protein, 198 aa, Arabidopsis thaliana; identical to SEQ ID NO: 106898
  peptide (1)..(198): Ceres Seq. ID no. 13620796

SEQ ID NO: 118138 - DNA, 1246 bp, Arabidopsis thaliana; identical to SEQ ID NO: 106899
  misc_feature (1)..(1246): Ceres Seq. ID no. 13620805
  misc_feature (1)..(1246): Ortholog of  Ceres SEQ ID NO 15178042 as cited in SEQ ID NO 54787
  misc_feature (1)..(1246): Ortholog of  Ceres SEQ ID NO 13596585 as cited in SEQ ID NO 62424
  misc_feature (1)..(1246): Ortholog of  Ceres SEQ ID NO 13597899 as cited in SEQ ID NO 64374

SEQ ID NO: 118139 - protein, 347 aa, Arabidopsis thaliana; identical to SEQ ID NO: 106900
  peptide (1)..(347): Ceres Seq. ID no. 13620806

SEQ ID NO: 118140 - protein, 319 aa, Arabidopsis thaliana; identical to SEQ ID NO: 106901
  peptide (1)..(319): Ceres Seq. ID no. 13620807

SEQ ID NO: 118141 - protein, 287 aa, Arabidopsis thaliana; identical to SEQ ID NO: 106902
  peptide (1)..(287): Ceres Seq. ID no. 13620808

SEQ ID NO: 118142 - DNA, 1323 bp, Arabidopsis thaliana; identical to SEQ ID NO: 106903
  misc_feature (1)..(1323): Ceres Seq. ID no. 13620834
  misc_feature (1)..(1323): Ortholog of  Ceres SEQ ID NO 14313893 as cited in SEQ ID NO 54646
  misc_feature (1)..(1323): Ortholog of  Ceres SEQ ID NO 13656797 as cited in SEQ ID NO 65756
  misc_feature (1)..(1323): Ortholog of  Ceres SEQ ID NO 13658498 as cited in SEQ ID NO 66557
  misc_feature (1)..(1323): Ortholog of  Ceres SEQ ID NO 15227053 as cited in SEQ ID NO 0

SEQ ID NO: 118143 - protein, 386 aa, Arabidopsis thaliana; identical to SEQ ID NO: 106904
  peptide (1)..(386): Ceres Seq. ID no. 13620835

SEQ ID NO: 118144 - protein, 354 aa, Arabidopsis thaliana; identical to SEQ ID NO: 106905
  peptide (1)..(354): Ceres Seq. ID no. 13620836

SEQ ID NO: 118145 - protein, 215 aa, Arabidopsis thaliana; identical to SEQ ID NO: 106906
  peptide (1)..(215): Ceres Seq. ID no. 13620837

SEQ ID NO: 118146 - DNA, 1129 bp, Arabidopsis thaliana; identical to SEQ ID NO: 106907
  misc_feature (1)..(1129): Ceres Seq. ID no. 13620842
  misc_feature (1)..(1129): Ortholog of  Ceres SEQ ID NO 12609041 as cited in SEQ ID NO 51310
  misc_feature (1)..(1129): Ortholog of  Ceres SEQ ID NO 13594966 as cited in SEQ ID NO 56152
  misc_feature (1)..(1129): Ortholog of  Ceres SEQ ID NO 14312224 as cited in SEQ ID NO 57255
  misc_feature (1)..(1129): Ortholog of  Ceres SEQ ID NO 12582457 as cited in SEQ ID NO 57530
  misc_feature (1)..(1129): Ortholog of  Ceres SEQ ID NO 13655804 as cited in SEQ ID NO 64881

SEQ ID NO: 118147 - protein, 176 aa, Arabidopsis thaliana; identical to SEQ ID NO: 106908
  peptide (1)..(176): Ceres Seq. ID no. 13620843

SEQ ID NO: 118148 - protein, 121 aa, Arabidopsis thaliana; identical to SEQ ID NO: 106909
  peptide (1)..(121): Ceres Seq. ID no. 13620844

SEQ ID NO: 118149 - DNA, 750 bp, Arabidopsis thaliana; identical to SEQ ID NO: 106910
  misc_feature (1)..(750): Ceres Seq. ID no. 13620845
  misc_feature (1)..(750): Ortholog of  Ceres SEQ ID NO 13655108 as cited in SEQ ID NO 62996

SEQ ID NO: 118150 - protein, 163 aa, Arabidopsis thaliana; identical to SEQ ID NO: 106911
  peptide (1)..(163): Ceres Seq. ID no. 13620846

SEQ ID NO: 118151 - protein, 151 aa, Arabidopsis thaliana; identical to SEQ ID NO: 106912
  peptide (1)..(151): Ceres Seq. ID no. 13620847

SEQ ID NO: 118152 - protein, 90 aa, Arabidopsis thaliana; identical to SEQ ID NO: 106913
  peptide (1)..(90): Ceres Seq. ID no. 13620848

SEQ ID NO: 118153 - DNA, 1622 bp, Arabidopsis thaliana; identical to SEQ ID NO: 106914
  misc_feature (1)..(1622): Ceres Seq. ID no. 13620865
  misc_feature (1)..(1622): Ortholog of  Ceres SEQ ID NO 14311535 as cited in SEQ ID NO 51559
  misc_feature (1)..(1622): Ortholog of  Ceres SEQ ID NO 15176200 as cited in SEQ ID NO 55188

SEQ ID NO: 118154 - protein, 480 aa, Arabidopsis thaliana; identical to SEQ ID NO: 106915
  peptide (1)..(480): Ceres Seq. ID no. 13620866

SEQ ID NO: 118155 - protein, 476 aa, Arabidopsis thaliana; identical to SEQ ID NO: 106916
  peptide (1)..(476): Ceres Seq. ID no. 13620867

SEQ ID NO: 118156 - protein, 455 aa, Arabidopsis thaliana; identical to SEQ ID NO: 106917
  peptide (1)..(455): Ceres Seq. ID no. 13620868

SEQ ID NO: 118157 - DNA, 1008 bp, Arabidopsis thaliana; identical to SEQ ID NO: 106918
  misc_feature (1)..(1008): Ceres Seq. ID no. 13620873
  misc_feature (1)..(1008): Ortholog of  Ceres SEQ ID NO 14307589 as cited in SEQ ID NO 20466
  misc_feature (1)..(1008): Ortholog of  Ceres SEQ ID NO 12611159 as cited in SEQ ID NO 59821
  misc_feature (1)..(1008): Ortholog of  Ceres SEQ ID NO 13584238 as cited in SEQ ID NO 64216
  misc_feature (1)..(1008): Ortholog of  Ceres SEQ ID NO 13661001 as cited in SEQ ID NO 67531

SEQ ID NO: 118158 - protein, 235 aa, Arabidopsis thaliana; identical to SEQ ID NO: 106919
  peptide (1)..(235): Ceres Seq. ID no. 13620874

SEQ ID NO: 118159 - protein, 170 aa, Arabidopsis thaliana; identical to SEQ ID NO: 106920
  peptide (1)..(170): Ceres Seq. ID no. 13620875

SEQ ID NO: 118160 - protein, 128 aa, Arabidopsis thaliana; identical to SEQ ID NO: 106921
  peptide (1)..(128): Ceres Seq. ID no. 13620876

SEQ ID NO: 118161 - DNA, 2587 bp, Arabidopsis thaliana; identical to SEQ ID NO: 106922
  misc_feature (1)..(2587): Ceres Seq. ID no. 13620877
  misc_feature (1)..(2587): Ortholog of  Ceres SEQ ID NO 15176095 as cited in SEQ ID NO 59699

SEQ ID NO: 118162 - protein, 778 aa, Arabidopsis thaliana; identical to SEQ ID NO: 106923
  peptide (1)..(778): Ceres Seq. ID no. 13620878

SEQ ID NO: 118163 - protein, 776 aa, Arabidopsis thaliana; identical to SEQ ID NO: 106924
  peptide (1)..(776): Ceres Seq. ID no. 13620879

SEQ ID NO: 118164 - protein, 763 aa, Arabidopsis thaliana; identical to SEQ ID NO: 106925
  peptide (1)..(763): Ceres Seq. ID no. 13620880

SEQ ID NO: 118165 - DNA, 1151 bp, Arabidopsis thaliana; identical to SEQ ID NO: 106926
  misc_feature (1)..(1151): Ceres Seq. ID no. 13620887
  misc_feature (1)..(1151): Ortholog of  Ceres SEQ ID NO 14308600 as cited in SEQ ID NO 60485
  misc_feature (1)..(1151): Ortholog of  Ceres SEQ ID NO 13584797 as cited in SEQ ID NO 69087

SEQ ID NO: 118166 - protein, 250 aa, Arabidopsis thaliana; identical to SEQ ID NO: 106927
  peptide (1)..(250): Ceres Seq. ID no. 13620888

SEQ ID NO: 118167 - protein, 140 aa, Arabidopsis thaliana; identical to SEQ ID NO: 106928
  peptide (1)..(140): Ceres Seq. ID no. 13620889

SEQ ID NO: 118168 - protein, 131 aa, Arabidopsis thaliana; identical to SEQ ID NO: 106929
  peptide (1)..(131): Ceres Seq. ID no. 13620890

SEQ ID NO: 118169 - DNA, 915 bp, Arabidopsis thaliana; identical to SEQ ID NO: 106930
  misc_feature (1)..(915): Ceres Seq. ID no. 13620903
  misc_feature (1)..(915): Ortholog of  Ceres SEQ ID NO 12558659 as cited in SEQ ID NO 20727
  misc_feature (1)..(915): Ortholog of  Ceres SEQ ID NO 15175034 as cited in SEQ ID NO 62432
  misc_feature (1)..(915): Ortholog of  Ceres SEQ ID NO 12619999 as cited in SEQ ID NO 66123
  misc_feature (1)..(915): Ortholog of  Ceres SEQ ID NO 13656436 as cited in SEQ ID NO 69154

SEQ ID NO: 118170 - protein, 217 aa, Arabidopsis thaliana; identical to SEQ ID NO: 106931
  peptide (1)..(217): Ceres Seq. ID no. 13620904

SEQ ID NO: 118171 - DNA, 2413 bp, Arabidopsis thaliana; identical to SEQ ID NO: 106932
  misc_feature (1)..(2413): Ceres Seq. ID no. 13620905
  misc_feature (1)..(2413): Ortholog of  Ceres SEQ ID NO 13584744 as cited in SEQ ID NO 69137

SEQ ID NO: 118172 - protein, 748 aa, Arabidopsis thaliana; identical to SEQ ID NO: 106933
  peptide (1)..(748): Ceres Seq. ID no. 13620906

SEQ ID NO: 118173 - protein, 466 aa, Arabidopsis thaliana; identical to SEQ ID NO: 106934
  peptide (1)..(466): Ceres Seq. ID no. 13620907

SEQ ID NO: 118174 - protein, 424 aa, Arabidopsis thaliana; identical to SEQ ID NO: 106935
  peptide (1)..(424): Ceres Seq. ID no. 13620908

SEQ ID NO: 118175 - DNA, 1652 bp, Arabidopsis thaliana; identical to SEQ ID NO: 106936
  misc_feature (1)..(1652): Ceres Seq. ID no. 13620909
  misc_feature (1)..(1652): Ortholog of  Ceres SEQ ID NO 14314620 as cited in SEQ ID NO 56872
  misc_feature (1)..(1652): Ortholog of  Ceres SEQ ID NO 15178460 as cited in SEQ ID NO 66107

SEQ ID NO: 118176 - protein, 471 aa, Arabidopsis thaliana; identical to SEQ ID NO: 106937
  peptide (1)..(471): Ceres Seq. ID no. 13620910

SEQ ID NO: 118177 - protein, 459 aa, Arabidopsis thaliana; identical to SEQ ID NO: 106938
  peptide (1)..(459): Ceres Seq. ID no. 13620911

SEQ ID NO: 118178 - protein, 401 aa, Arabidopsis thaliana; identical to SEQ ID NO: 106939
  peptide (1)..(401): Ceres Seq. ID no. 13620912

SEQ ID NO: 118179 - DNA, 2800 bp, Arabidopsis thaliana; identical to SEQ ID NO: 106940
  misc_feature (1)..(2800): Ceres Seq. ID no. 13620917
  misc_feature (1)..(2800): Ortholog of  Ceres SEQ ID NO 13654989 as cited in SEQ ID NO 63117
  misc_feature (1)..(2800): Ortholog of  Ceres SEQ ID NO 13584744 as cited in SEQ ID NO 69137

SEQ ID NO: 118180 - protein, 845 aa, Arabidopsis thaliana; identical to SEQ ID NO: 106941
  peptide (1)..(845): Ceres Seq. ID no. 13620918

SEQ ID NO: 118181 - protein, 777 aa, Arabidopsis thaliana; identical to SEQ ID NO: 106942
  peptide (1)..(777): Ceres Seq. ID no. 13620919

SEQ ID NO: 118182 - protein, 749 aa, Arabidopsis thaliana; identical to SEQ ID NO: 106943
  peptide (1)..(749): Ceres Seq. ID no. 13620920

SEQ ID NO: 118183 - DNA, 1945 bp, Arabidopsis thaliana; identical to SEQ ID NO: 106944
  misc_feature (1)..(1945): Ceres Seq. ID no. 13620921
  misc_feature (1)..(1945): Ortholog of  Ceres SEQ ID NO 15171438 as cited in SEQ ID NO 51665
  misc_feature (1)..(1945): Ortholog of  Ceres SEQ ID NO 15170804 as cited in SEQ ID NO 52653
  misc_feature (1)..(1945): Ortholog of  Ceres SEQ ID NO 15170203 as cited in SEQ ID NO 53291

SEQ ID NO: 118184 - protein, 473 aa, Arabidopsis thaliana; identical to SEQ ID NO: 106945
  peptide (1)..(473): Ceres Seq. ID no. 13620922

SEQ ID NO: 118185 - protein, 376 aa, Arabidopsis thaliana; identical to SEQ ID NO: 106946
  peptide (1)..(376): Ceres Seq. ID no. 13620923

SEQ ID NO: 118186 - DNA, 1173 bp, Arabidopsis thaliana; identical to SEQ ID NO: 106947
  misc_feature (1)..(1173): Ceres Seq. ID no. 13620934
  misc_feature (1)..(1173): Ortholog of  Ceres SEQ ID NO 13502952 as cited in SEQ ID NO 62271
  misc_feature (1)..(1173): Ortholog of  Ceres SEQ ID NO 13502973 as cited in SEQ ID NO 68052
  misc_feature (1)..(1173): Ortholog of  Ceres SEQ ID NO 13596000 as cited in SEQ ID NO 68188

SEQ ID NO: 118187 - protein, 361 aa, Arabidopsis thaliana; identical to SEQ ID NO: 106948
  peptide (1)..(361): Ceres Seq. ID no. 13620935

SEQ ID NO: 118188 - protein, 319 aa, Arabidopsis thaliana; identical to SEQ ID NO: 106949
  peptide (1)..(319): Ceres Seq. ID no. 13620936

SEQ ID NO: 118189 - protein, 252 aa, Arabidopsis thaliana; identical to SEQ ID NO: 106950
  peptide (1)..(252): Ceres Seq. ID no. 13620937

SEQ ID NO: 118190 - DNA, 1838 bp, Arabidopsis thaliana; identical to SEQ ID NO: 106951
  misc_feature (1)..(1838): Ceres Seq. ID no. 13620943
  misc_feature (1)..(1838): Ortholog of  Ceres SEQ ID NO 13502874 as cited in SEQ ID NO 66298
  misc_feature (1)..(1838): Ortholog of  Ceres SEQ ID NO 12614124 as cited in SEQ ID NO 68392

SEQ ID NO: 118191 - protein, 510 aa, Arabidopsis thaliana; identical to SEQ ID NO: 106952
  peptide (1)..(510): Ceres Seq. ID no. 13620944

SEQ ID NO: 118192 - protein, 376 aa, Arabidopsis thaliana; identical to SEQ ID NO: 106953
  peptide (1)..(376): Ceres Seq. ID no. 13620945

SEQ ID NO: 118193 - protein, 339 aa, Arabidopsis thaliana; identical to SEQ ID NO: 106954
  peptide (1)..(339): Ceres Seq. ID no. 13620946

SEQ ID NO: 118194 - DNA, 969 bp, Arabidopsis thaliana; identical to SEQ ID NO: 106955
  misc_feature (1)..(969): Ceres Seq. ID no. 13620947
  misc_feature (1)..(969): Ortholog of  Ceres SEQ ID NO 12608801 as cited in SEQ ID NO 50884
  misc_feature (1)..(969): Ortholog of  Ceres SEQ ID NO 12635796 as cited in SEQ ID NO 0

SEQ ID NO: 118195 - protein, 230 aa, Arabidopsis thaliana; identical to SEQ ID NO: 34771
  peptide (1)..(230): Ceres Seq. ID no. 13620948

SEQ ID NO: 118196 - protein, 187 aa, Arabidopsis thaliana; identical to SEQ ID NO: 34772
  peptide (1)..(187): Ceres Seq. ID no. 13620949

SEQ ID NO: 118197 - protein, 143 aa, Arabidopsis thaliana; identical to SEQ ID NO: 34773
  peptide (1)..(143): Ceres Seq. ID no. 13620950

SEQ ID NO: 118198 - DNA, 1700 bp, Arabidopsis thaliana; identical to SEQ ID NO: 106959
  misc_feature (1)..(1700): Ceres Seq. ID no. 13620963
  misc_feature (1)..(1700): Ortholog of  Ceres SEQ ID NO 15172274 as cited in SEQ ID NO 59703

SEQ ID NO: 118199 - protein, 487 aa, Arabidopsis thaliana; identical to SEQ ID NO: 106960
  peptide (1)..(487): Ceres Seq. ID no. 13620964

SEQ ID NO: 118200 - protein, 454 aa, Arabidopsis thaliana; identical to SEQ ID NO: 106961
  peptide (1)..(454): Ceres Seq. ID no. 13620965

SEQ ID NO: 118201 - protein, 427 aa, Arabidopsis thaliana; identical to SEQ ID NO: 106962
  peptide (1)..(427): Ceres Seq. ID no. 13620966

SEQ ID NO: 118202 - DNA, 911 bp, Arabidopsis thaliana; identical to SEQ ID NO: 106963
  misc_feature (1)..(911): Ceres Seq. ID no. 13620967
  misc_feature (1)..(911): Ortholog of  Ceres SEQ ID NO 14306110 as cited in SEQ ID NO 1363

SEQ ID NO: 118203 - protein, 202 aa, Arabidopsis thaliana; identical to SEQ ID NO: 30996
  peptide (1)..(202): Ceres Seq. ID no. 13620968

SEQ ID NO: 118204 - protein, 200 aa, Arabidopsis thaliana; identical to SEQ ID NO: 30997
  peptide (1)..(200): Ceres Seq. ID no. 13620969

SEQ ID NO: 118205 - protein, 194 aa, Arabidopsis thaliana; identical to SEQ ID NO: 30998
  peptide (1)..(194): Ceres Seq. ID no. 13620970

SEQ ID NO: 118206 - DNA, 766 bp, Arabidopsis thaliana; identical to SEQ ID NO: 106967
  misc_feature (1)..(766): Ceres Seq. ID no. 13621000
  misc_feature (1)..(766): Ortholog of  Ceres SEQ ID NO 13595613 as cited in SEQ ID NO 59866

SEQ ID NO: 118207 - protein, 161 aa, Arabidopsis thaliana; identical to SEQ ID NO: 106968
  peptide (1)..(161): Ceres Seq. ID no. 13621001

SEQ ID NO: 118208 - protein, 87 aa, Arabidopsis thaliana; identical to SEQ ID NO: 76963
  peptide (1)..(87): Ceres Seq. ID no. 13621002

SEQ ID NO: 118209 - DNA, 1481 bp, Arabidopsis thaliana; identical to SEQ ID NO: 106970
  misc_feature (1)..(1481): Ceres Seq. ID no. 13621007
  misc_feature (1)..(1481): Ortholog of  Ceres SEQ ID NO 15177414 as cited in SEQ ID NO 57242
  misc_feature (1)..(1481): Ortholog of  Ceres SEQ ID NO 13594151 as cited in SEQ ID NO 58886

SEQ ID NO: 118210 - protein, 398 aa, Arabidopsis thaliana; identical to SEQ ID NO: 106971
  peptide (1)..(398): Ceres Seq. ID no. 13621008

SEQ ID NO: 118211 - protein, 372 aa, Arabidopsis thaliana; identical to SEQ ID NO: 41537
  peptide (1)..(372): Ceres Seq. ID no. 13621009

SEQ ID NO: 118212 - protein, 350 aa, Arabidopsis thaliana; identical to SEQ ID NO: 41538
  peptide (1)..(350): Ceres Seq. ID no. 13621010

SEQ ID NO: 118213 - DNA, 1742 bp, Arabidopsis thaliana; identical to SEQ ID NO: 106974
  misc_feature (1)..(1742): Ceres Seq. ID no. 13621015
  misc_feature (1)..(1742): Ortholog of  Ceres SEQ ID NO 13600220 as cited in SEQ ID NO 0

SEQ ID NO: 118214 - protein, 523 aa, Arabidopsis thaliana; identical to SEQ ID NO: 106975
  peptide (1)..(523): Ceres Seq. ID no. 13621016

SEQ ID NO: 118215 - protein, 510 aa, Arabidopsis thaliana; identical to SEQ ID NO: 106976
  peptide (1)..(510): Ceres Seq. ID no. 13621017

SEQ ID NO: 118216 - protein, 398 aa, Arabidopsis thaliana; identical to SEQ ID NO: 106977
  peptide (1)..(398): Ceres Seq. ID no. 13621018

SEQ ID NO: 118217 - DNA, 1563 bp, Arabidopsis thaliana; identical to SEQ ID NO: 106978
  misc_feature (1)..(1563): Ceres Seq. ID no. 13621019
  misc_feature (1)..(1563): Ortholog of  Ceres SEQ ID NO 14316553 as cited in SEQ ID NO 20761
  misc_feature (1)..(1563): Ortholog of  Ceres SEQ ID NO 13502573 as cited in SEQ ID NO 60342

SEQ ID NO: 118218 - protein, 387 aa, Arabidopsis thaliana; identical to SEQ ID NO: 106979
  peptide (1)..(387): Ceres Seq. ID no. 13621020

SEQ ID NO: 118219 - protein, 382 aa, Arabidopsis thaliana; identical to SEQ ID NO: 106980
  peptide (1)..(382): Ceres Seq. ID no. 13621021

SEQ ID NO: 118220 - protein, 330 aa, Arabidopsis thaliana; identical to SEQ ID NO: 106981
  peptide (1)..(330): Ceres Seq. ID no. 13621022

SEQ ID NO: 118221 - DNA, 1600 bp, Arabidopsis thaliana; identical to SEQ ID NO: 106982
  misc_feature (1)..(1600): Ceres Seq. ID no. 13621023
  misc_feature (1)..(1600): Ortholog of  Ceres SEQ ID NO 14315455 as cited in SEQ ID NO 56988
  misc_feature (1)..(1600): Ortholog of  Ceres SEQ ID NO 13596921 as cited in SEQ ID NO 62368
  misc_feature (1)..(1600): Ortholog of  Ceres SEQ ID NO 13600673 as cited in SEQ ID NO 0

SEQ ID NO: 118222 - protein, 485 aa, Arabidopsis thaliana; identical to SEQ ID NO: 106983
  peptide (1)..(485): Ceres Seq. ID no. 13621024

SEQ ID NO: 118223 - protein, 470 aa, Arabidopsis thaliana; identical to SEQ ID NO: 106984
  peptide (1)..(470): Ceres Seq. ID no. 13621025

SEQ ID NO: 118224 - protein, 441 aa, Arabidopsis thaliana; identical to SEQ ID NO: 106985
  peptide (1)..(441): Ceres Seq. ID no. 13621026

SEQ ID NO: 118225 - DNA, 2107 bp, Arabidopsis thaliana; identical to SEQ ID NO: 106986
  misc_feature (1)..(2107): Ceres Seq. ID no. 13621031
  misc_feature (1)..(2107): Ortholog of  Ceres SEQ ID NO 12586556 as cited in SEQ ID NO 64667
  misc_feature (1)..(2107): Ortholog of  Ceres SEQ ID NO 14316045 as cited in SEQ ID NO 66810
  misc_feature (1)..(2107): Ortholog of  Ceres SEQ ID NO 13660894 as cited in SEQ ID NO 67475

SEQ ID NO: 118226 - protein, 538 aa, Arabidopsis thaliana; identical to SEQ ID NO: 106987
  peptide (1)..(538): Ceres Seq. ID no. 13621032

SEQ ID NO: 118227 - protein, 521 aa, Arabidopsis thaliana; identical to SEQ ID NO: 72164
  peptide (1)..(521): Ceres Seq. ID no. 13621033

SEQ ID NO: 118228 - protein, 492 aa, Arabidopsis thaliana; identical to SEQ ID NO: 72165
  peptide (1)..(492): Ceres Seq. ID no. 13621034

SEQ ID NO: 118229 - DNA, 742 bp, Arabidopsis thaliana; identical to SEQ ID NO: 106990
  misc_feature (1)..(742): Ceres Seq. ID no. 13621035
  misc_feature (1)..(742): Ortholog of  Ceres SEQ ID NO 12556792 as cited in SEQ ID NO 37
  misc_feature (1)..(742): Ortholog of  Ceres SEQ ID NO 15179171 as cited in SEQ ID NO 0

SEQ ID NO: 118230 - protein, 167 aa, Arabidopsis thaliana; identical to SEQ ID NO: 106991
  peptide (1)..(167): Ceres Seq. ID no. 13621036

SEQ ID NO: 118231 - DNA, 869 bp, Arabidopsis thaliana; identical to SEQ ID NO: 106992
  misc_feature (1)..(869): Ceres Seq. ID no. 13621052
  misc_feature (1)..(869): Ortholog of  Ceres SEQ ID NO 14305963 as cited in SEQ ID NO 52290
  misc_feature (1)..(869): Ortholog of  Ceres SEQ ID NO 14307492 as cited in SEQ ID NO 59504
  misc_feature (1)..(869): Ortholog of  Ceres SEQ ID NO 13597255 as cited in SEQ ID NO 63874

SEQ ID NO: 118232 - protein, 211 aa, Arabidopsis thaliana; identical to SEQ ID NO: 106993
  peptide (1)..(211): Ceres Seq. ID no. 13621053

SEQ ID NO: 118233 - protein, 168 aa, Arabidopsis thaliana; identical to SEQ ID NO: 106994
  peptide (1)..(168): Ceres Seq. ID no. 13621054

SEQ ID NO: 118234 - DNA, 831 bp, Arabidopsis thaliana; identical to SEQ ID NO: 106995
  misc_feature (1)..(831): Ceres Seq. ID no. 13621055
  misc_feature (1)..(831): Ortholog of  Ceres SEQ ID NO 12581874 as cited in SEQ ID NO 55321

SEQ ID NO: 118235 - protein, 162 aa, Arabidopsis thaliana; identical to SEQ ID NO: 106996
  peptide (1)..(162): Ceres Seq. ID no. 13621056

SEQ ID NO: 118236 - protein, 148 aa, Arabidopsis thaliana; identical to SEQ ID NO: 106997
  peptide (1)..(148): Ceres Seq. ID no. 13621057

SEQ ID NO: 118237 - protein, 128 aa, Arabidopsis thaliana; identical to SEQ ID NO: 106998
  peptide (1)..(128): Ceres Seq. ID no. 13621058

SEQ ID NO: 118238 - DNA, 1736 bp, Arabidopsis thaliana; identical to SEQ ID NO: 106999
  misc_feature (1)..(1736): Ceres Seq. ID no. 13621063
  misc_feature (1)..(1736): Ortholog of  Ceres SEQ ID NO 13582281 as cited in SEQ ID NO 51014
  misc_feature (1)..(1736): Ortholog of  Ceres SEQ ID NO 14315606 as cited in SEQ ID NO 53515
  misc_feature (1)..(1736): Ortholog of  Ceres SEQ ID NO 13597574 as cited in SEQ ID NO 64677
  misc_feature (1)..(1736): Ortholog of  Ceres SEQ ID NO 12617417 as cited in SEQ ID NO 65089

SEQ ID NO: 118239 - protein, 473 aa, Arabidopsis thaliana; identical to SEQ ID NO: 107000
  peptide (1)..(473): Ceres Seq. ID no. 13621064

SEQ ID NO: 118240 - protein, 460 aa, Arabidopsis thaliana; identical to SEQ ID NO: 107001
  peptide (1)..(460): Ceres Seq. ID no. 13621065

SEQ ID NO: 118241 - protein, 452 aa, Arabidopsis thaliana; identical to SEQ ID NO: 107002
  peptide (1)..(452): Ceres Seq. ID no. 13621066

SEQ ID NO: 118242 - DNA, 662 bp, Arabidopsis thaliana; identical to SEQ ID NO: 107003
  misc_feature (1)..(662): Ceres Seq. ID no. 13621069
  misc_feature (1)..(662): Ortholog of  Ceres SEQ ID NO 15179191 as cited in SEQ ID NO 0

SEQ ID NO: 118243 - protein, 210 aa, Arabidopsis thaliana; identical to SEQ ID NO: 107004
  peptide (1)..(210): Ceres Seq. ID no. 13621070

SEQ ID NO: 118244 - DNA, 956 bp, Arabidopsis thaliana; identical to SEQ ID NO: 107005
  misc_feature (1)..(956): Ceres Seq. ID no. 13621071
  misc_feature (1)..(956): Ortholog of  Ceres SEQ ID NO 14314068 as cited in SEQ ID NO 52242
  misc_feature (1)..(956): Ortholog of  Ceres SEQ ID NO 14314999 as cited in SEQ ID NO 52342
  misc_feature (1)..(956): Ortholog of  Ceres SEQ ID NO 15177057 as cited in SEQ ID NO 55817
  misc_feature (1)..(956): Ortholog of  Ceres SEQ ID NO 13585458 as cited in SEQ ID NO 60907
  misc_feature (1)..(956): Ortholog of  Ceres SEQ ID NO 13598678 as cited in SEQ ID NO 61508
  misc_feature (1)..(956): Ortholog of  Ceres SEQ ID NO 12625392 as cited in SEQ ID NO 63315
  misc_feature (1)..(956): Ortholog of  Ceres SEQ ID NO 13598319 as cited in SEQ ID NO 68758
  misc_feature (1)..(956): Ortholog of  Ceres SEQ ID NO 12589816 as cited in SEQ ID NO 0

SEQ ID NO: 118245 - protein, 259 aa, Arabidopsis thaliana; identical to SEQ ID NO: 107006
  peptide (1)..(259): Ceres Seq. ID no. 13621072

SEQ ID NO: 118246 - protein, 192 aa, Arabidopsis thaliana; identical to SEQ ID NO: 107007
  peptide (1)..(192): Ceres Seq. ID no. 13621073

SEQ ID NO: 118247 - protein, 131 aa, Arabidopsis thaliana; identical to SEQ ID NO: 107008
  peptide (1)..(131): Ceres Seq. ID no. 13621074

SEQ ID NO: 118248 - DNA, 1585 bp, Arabidopsis thaliana; identical to SEQ ID NO: 107009
  misc_feature (1)..(1585): Ceres Seq. ID no. 13621095
  misc_feature (1)..(1585): Ortholog of  Ceres SEQ ID NO 12612314 as cited in SEQ ID NO 51420

SEQ ID NO: 118249 - protein, 472 aa, Arabidopsis thaliana; identical to SEQ ID NO: 107010
  peptide (1)..(472): Ceres Seq. ID no. 13621096

SEQ ID NO: 118250 - protein, 459 aa, Arabidopsis thaliana; identical to SEQ ID NO: 107011
  peptide (1)..(459): Ceres Seq. ID no. 13621097

SEQ ID NO: 118251 - protein, 421 aa, Arabidopsis thaliana; identical to SEQ ID NO: 107012
  peptide (1)..(421): Ceres Seq. ID no. 13621098

SEQ ID NO: 118252 - DNA, 1370 bp, Arabidopsis thaliana; identical to SEQ ID NO: 107013
  misc_feature (1)..(1370): Ceres Seq. ID no. 13621099
  misc_feature (1)..(1370): Ortholog of  Ceres SEQ ID NO 15176803 as cited in SEQ ID NO 52778
  misc_feature (1)..(1370): Ortholog of  Ceres SEQ ID NO 14302283 as cited in SEQ ID NO 68688

SEQ ID NO: 118253 - protein, 310 aa, Arabidopsis thaliana; identical to SEQ ID NO: 107014
  peptide (1)..(310): Ceres Seq. ID no. 13621100

SEQ ID NO: 118254 - protein, 309 aa, Arabidopsis thaliana; identical to SEQ ID NO: 107015
  peptide (1)..(309): Ceres Seq. ID no. 13621101

SEQ ID NO: 118255 - protein, 277 aa, Arabidopsis thaliana; identical to SEQ ID NO: 107016
  peptide (1)..(277): Ceres Seq. ID no. 13621102

SEQ ID NO: 118256 - DNA, 692 bp, Arabidopsis thaliana; identical to SEQ ID NO: 107017
  misc_feature (1)..(692): Ceres Seq. ID no. 13621156
  misc_feature (1)..(692): Ortholog of  Ceres SEQ ID NO 13598935 as cited in SEQ ID NO 1239
  misc_feature (1)..(692): Ortholog of  Ceres SEQ ID NO 13598171 as cited in SEQ ID NO 61357
  misc_feature (1)..(692): Ortholog of  Ceres SEQ ID NO 13664149 as cited in SEQ ID NO 61490

SEQ ID NO: 118257 - protein, 209 aa, Arabidopsis thaliana; identical to SEQ ID NO: 107018
  peptide (1)..(209): Ceres Seq. ID no. 13621157

SEQ ID NO: 118258 - protein, 187 aa, Arabidopsis thaliana; identical to SEQ ID NO: 107019
  peptide (1)..(187): Ceres Seq. ID no. 13621158

SEQ ID NO: 118259 - protein, 178 aa, Arabidopsis thaliana; identical to SEQ ID NO: 107020
  peptide (1)..(178): Ceres Seq. ID no. 13621159

SEQ ID NO: 118260 - DNA, 1201 bp, Arabidopsis thaliana; identical to SEQ ID NO: 107021
  misc_feature (1)..(1201): Ceres Seq. ID no. 13621160
  misc_feature (1)..(1201): Ortholog of  Ceres SEQ ID NO 14307265 as cited in SEQ ID NO 54298

SEQ ID NO: 118261 - protein, 351 aa, Arabidopsis thaliana; identical to SEQ ID NO: 107022
  peptide (1)..(351): Ceres Seq. ID no. 13621161

SEQ ID NO: 118262 - protein, 319 aa, Arabidopsis thaliana; identical to SEQ ID NO: 107023
  peptide (1)..(319): Ceres Seq. ID no. 13621162

SEQ ID NO: 118263 - protein, 282 aa, Arabidopsis thaliana; identical to SEQ ID NO: 107024
  peptide (1)..(282): Ceres Seq. ID no. 13621163

SEQ ID NO: 118264 - DNA, 1959 bp, Arabidopsis thaliana; identical to SEQ ID NO: 107025
  misc_feature (1)..(1959): Ceres Seq. ID no. 13621187
  misc_feature (1)..(1959): Ortholog of  Ceres SEQ ID NO 14301836 as cited in SEQ ID NO 67386

SEQ ID NO: 118265 - protein, 273 aa, Arabidopsis thaliana; identical to SEQ ID NO: 107026
  peptide (1)..(273): Ceres Seq. ID no. 13621188

SEQ ID NO: 118266 - protein, 244 aa, Arabidopsis thaliana; identical to SEQ ID NO: 107027
  peptide (1)..(244): Ceres Seq. ID no. 13621189

SEQ ID NO: 118267 - protein, 141 aa, Arabidopsis thaliana; identical to SEQ ID NO: 107028
  peptide (1)..(141): Ceres Seq. ID no. 13621190

SEQ ID NO: 118268 - DNA, 2724 bp, Arabidopsis thaliana; identical to SEQ ID NO: 107029
  misc_feature (1)..(2724): Ceres Seq. ID no. 13621191
  misc_feature (1)..(2724): Ortholog of  Ceres SEQ ID NO 14316144 as cited in SEQ ID NO 52397
  misc_feature (2459)..(2459): n is a, c, t, g, unknown, or other
  misc_feature (2669)..(2669): n is a, c, t, g, unknown, or other

SEQ ID NO: 118269 - protein, 907 aa, Arabidopsis thaliana; identical to SEQ ID NO: 107030
  peptide (1)..(907): Ceres Seq. ID no. 13621192
  misc_feature (820)..(820): Xaa is any aa, unknown or other
  misc_feature (890)..(890): Xaa is any aa, unknown or other

SEQ ID NO: 118270 - protein, 858 aa, Arabidopsis thaliana; identical to SEQ ID NO: 107031
  peptide (1)..(858): Ceres Seq. ID no. 13621193
  misc_feature (771)..(771): Xaa is any aa, unknown or other
  misc_feature (841)..(841): Xaa is any aa, unknown or other

SEQ ID NO: 118271 - protein, 832 aa, Arabidopsis thaliana; identical to SEQ ID NO: 107032
  peptide (1)..(832): Ceres Seq. ID no. 13621194
  misc_feature (745)..(745): Xaa is any aa, unknown or other
  misc_feature (815)..(815): Xaa is any aa, unknown or other

SEQ ID NO: 118272 - DNA, 1609 bp, Arabidopsis thaliana; identical to SEQ ID NO: 107033
  misc_feature (1)..(1609): Ceres Seq. ID no. 13621209
  misc_feature (1)..(1609): Ortholog of  Ceres SEQ ID NO 13594349 as cited in SEQ ID NO 58161
  misc_feature (1)..(1609): Ortholog of  Ceres SEQ ID NO 13663419 as cited in SEQ ID NO 66561

SEQ ID NO: 118273 - protein, 487 aa, Arabidopsis thaliana; identical to SEQ ID NO: 107034
  peptide (1)..(487): Ceres Seq. ID no. 13621210

SEQ ID NO: 118274 - protein, 293 aa, Arabidopsis thaliana; identical to SEQ ID NO: 107035
  peptide (1)..(293): Ceres Seq. ID no. 13621211

SEQ ID NO: 118275 - DNA, 1187 bp, Arabidopsis thaliana; identical to SEQ ID NO: 107036
  misc_feature (1)..(1187): Ceres Seq. ID no. 13621224
  misc_feature (1)..(1187): Ortholog of  Ceres SEQ ID NO 13598528 as cited in SEQ ID NO 64938

SEQ ID NO: 118276 - protein, 318 aa, Arabidopsis thaliana; identical to SEQ ID NO: 107037
  peptide (1)..(318): Ceres Seq. ID no. 13621225

SEQ ID NO: 118277 - protein, 216 aa, Arabidopsis thaliana; identical to SEQ ID NO: 107038
  peptide (1)..(216): Ceres Seq. ID no. 13621226

SEQ ID NO: 118278 - DNA, 1298 bp, Arabidopsis thaliana; identical to SEQ ID NO: 107039
  misc_feature (1)..(1298): Ceres Seq. ID no. 13621227
  misc_feature (1)..(1298): Ortholog of  Ceres SEQ ID NO 14301830 as cited in SEQ ID NO 62310
  misc_feature (1)..(1298): Ortholog of  Ceres SEQ ID NO 15179524 as cited in SEQ ID NO 0

SEQ ID NO: 118279 - protein, 364 aa, Arabidopsis thaliana; identical to SEQ ID NO: 107040
  peptide (1)..(364): Ceres Seq. ID no. 13621228

SEQ ID NO: 118280 - protein, 270 aa, Arabidopsis thaliana; identical to SEQ ID NO: 107041
  peptide (1)..(270): Ceres Seq. ID no. 13621229

SEQ ID NO: 118281 - DNA, 3175 bp, Arabidopsis thaliana; identical to SEQ ID NO: 107042
  misc_feature (1)..(3175): Ceres Seq. ID no. 13621234
  misc_feature (1)..(3175): Ortholog of  Ceres SEQ ID NO 13581686 as cited in SEQ ID NO 57695
  misc_feature (1)..(3175): Ortholog of  Ceres SEQ ID NO 15224315 as cited in SEQ ID NO 66131

SEQ ID NO: 118282 - protein, 905 aa, Arabidopsis thaliana; identical to SEQ ID NO: 107043
  peptide (1)..(905): Ceres Seq. ID no. 13621235

SEQ ID NO: 118283 - protein, 882 aa, Arabidopsis thaliana; identical to SEQ ID NO: 107044
  peptide (1)..(882): Ceres Seq. ID no. 13621236

SEQ ID NO: 118284 - protein, 833 aa, Arabidopsis thaliana; identical to SEQ ID NO: 107045
  peptide (1)..(833): Ceres Seq. ID no. 13621237

SEQ ID NO: 118285 - DNA, 1176 bp, Arabidopsis thaliana; identical to SEQ ID NO: 107046
  misc_feature (1)..(1176): Ceres Seq. ID no. 13621238
  misc_feature (1)..(1176): Ortholog of  Ceres SEQ ID NO 14305357 as cited in SEQ ID NO 60046
  misc_feature (1)..(1176): Ortholog of  Ceres SEQ ID NO 14313511 as cited in SEQ ID NO 64459
  misc_feature (1)..(1176): Ortholog of  Ceres SEQ ID NO 14303006 as cited in SEQ ID NO 67498
  misc_feature (1)..(1176): Ortholog of  Ceres SEQ ID NO 13599627 as cited in SEQ ID NO 0
  misc_feature (1)..(1176): Ortholog of  Ceres SEQ ID NO 14305069 as cited in SEQ ID NO 0

SEQ ID NO: 118286 - protein, 231 aa, Arabidopsis thaliana; identical to SEQ ID NO: 23905
  peptide (1)..(231): Ceres Seq. ID no. 13621239

SEQ ID NO: 118287 - DNA, 1428 bp, Arabidopsis thaliana; identical to SEQ ID NO: 107048
  misc_feature (1)..(1428): Ceres Seq. ID no. 13621244
  misc_feature (1)..(1428): Ortholog of  Ceres SEQ ID NO 15177291 as cited in SEQ ID NO 52286
  misc_feature (1)..(1428): Ortholog of  Ceres SEQ ID NO 13595164 as cited in SEQ ID NO 56222
  misc_feature (1)..(1428): Ortholog of  Ceres SEQ ID NO 13591068 as cited in SEQ ID NO 69043
  misc_feature (1)..(1428): Ortholog of  Ceres SEQ ID NO 13623041 as cited in SEQ ID NO 0

SEQ ID NO: 118288 - protein, 368 aa, Arabidopsis thaliana; identical to SEQ ID NO: 22215
  peptide (1)..(368): Ceres Seq. ID no. 13621245

SEQ ID NO: 118289 - protein, 272 aa, Arabidopsis thaliana; identical to SEQ ID NO: 22216
  peptide (1)..(272): Ceres Seq. ID no. 13621246

SEQ ID NO: 118290 - protein, 247 aa, Arabidopsis thaliana; identical to SEQ ID NO: 22217
  peptide (1)..(247): Ceres Seq. ID no. 13621247

SEQ ID NO: 118291 - DNA, 1028 bp, Arabidopsis thaliana; identical to SEQ ID NO: 107052
  misc_feature (1)..(1028): Ceres Seq. ID no. 13621248
  misc_feature (1)..(1028): Ortholog of  Ceres SEQ ID NO 12557497 as cited in SEQ ID NO 43
  misc_feature (1)..(1028): Ortholog of  Ceres SEQ ID NO 13664283 as cited in SEQ ID NO 61283
  misc_feature (1)..(1028): Ortholog of  Ceres SEQ ID NO 12635513 as cited in SEQ ID NO 0
  misc_feature (1)..(1028): Ortholog of  Ceres SEQ ID NO 15179044 as cited in SEQ ID NO 0
  misc_feature (1)..(1028): Ortholog of  Ceres SEQ ID NO 15179333 as cited in SEQ ID NO 0

SEQ ID NO: 118292 - protein, 257 aa, Arabidopsis thaliana; identical to SEQ ID NO: 107053
  peptide (1)..(257): Ceres Seq. ID no. 13621249

SEQ ID NO: 118293 - protein, 156 aa, Arabidopsis thaliana; identical to SEQ ID NO: 41714
  peptide (1)..(156): Ceres Seq. ID no. 13621250

SEQ ID NO: 118294 - DNA, 851 bp, Arabidopsis thaliana; identical to SEQ ID NO: 107055
  misc_feature (1)..(851): Ceres Seq. ID no. 13621254
  misc_feature (1)..(851): Ortholog of  Ceres SEQ ID NO 14315060 as cited in SEQ ID NO 60039
  misc_feature (1)..(851): Ortholog of  Ceres SEQ ID NO 13597809 as cited in SEQ ID NO 64598
  misc_feature (1)..(851): Ortholog of  Ceres SEQ ID NO 12617960 as cited in SEQ ID NO 69051
  misc_feature (1)..(851): Ortholog of  Ceres SEQ ID NO 13589401 as cited in SEQ ID NO 0

SEQ ID NO: 118295 - protein, 253 aa, Arabidopsis thaliana; identical to SEQ ID NO: 107056
  peptide (1)..(253): Ceres Seq. ID no. 13621255

SEQ ID NO: 118296 - protein, 245 aa, Arabidopsis thaliana; identical to SEQ ID NO: 107057
  peptide (1)..(245): Ceres Seq. ID no. 13621256

SEQ ID NO: 118297 - protein, 238 aa, Arabidopsis thaliana; identical to SEQ ID NO: 107058
  peptide (1)..(238): Ceres Seq. ID no. 13621257

SEQ ID NO: 118298 - DNA, 1329 bp, Arabidopsis thaliana; identical to SEQ ID NO: 107059
  misc_feature (1)..(1329): Ceres Seq. ID no. 13621262
  misc_feature (1)..(1329): Ortholog of  Ceres SEQ ID NO 14311207 as cited in SEQ ID NO 60304

SEQ ID NO: 118299 - protein, 315 aa, Arabidopsis thaliana; identical to SEQ ID NO: 107060
  peptide (1)..(315): Ceres Seq. ID no. 13621263

SEQ ID NO: 118300 - DNA, 1309 bp, Arabidopsis thaliana; identical to SEQ ID NO: 107061
  misc_feature (1)..(1309): Ceres Seq. ID no. 13621272
  misc_feature (1)..(1309): Ortholog of  Ceres SEQ ID NO 13597019 as cited in SEQ ID NO 64303
  misc_feature (1)..(1309): Ortholog of  Ceres SEQ ID NO 13654191 as cited in SEQ ID NO 68235
  misc_feature (1)..(1309): Ortholog of  Ceres SEQ ID NO 15179513 as cited in SEQ ID NO 0

SEQ ID NO: 118301 - protein, 358 aa, Arabidopsis thaliana; identical to SEQ ID NO: 107062
  peptide (1)..(358): Ceres Seq. ID no. 13621273

SEQ ID NO: 118302 - protein, 307 aa, Arabidopsis thaliana; identical to SEQ ID NO: 39873
  peptide (1)..(307): Ceres Seq. ID no. 13621274

SEQ ID NO: 118303 - protein, 252 aa, Arabidopsis thaliana; identical to SEQ ID NO: 39874
  peptide (1)..(252): Ceres Seq. ID no. 13621275

SEQ ID NO: 118304 - DNA, 1126 bp, Arabidopsis thaliana; identical to SEQ ID NO: 107065
  misc_feature (1)..(1126): Ceres Seq. ID no. 13621276
  misc_feature (1)..(1126): Ortholog of  Ceres SEQ ID NO 15176803 as cited in SEQ ID NO 52778
  misc_feature (1)..(1126): Ortholog of  Ceres SEQ ID NO 14302283 as cited in SEQ ID NO 68688

SEQ ID NO: 118305 - protein, 299 aa, Arabidopsis thaliana; identical to SEQ ID NO: 107066
  peptide (1)..(299): Ceres Seq. ID no. 13621277

SEQ ID NO: 118306 - protein, 283 aa, Arabidopsis thaliana; identical to SEQ ID NO: 107067
  peptide (1)..(283): Ceres Seq. ID no. 13621278

SEQ ID NO: 118307 - protein, 278 aa, Arabidopsis thaliana; identical to SEQ ID NO: 107068
  peptide (1)..(278): Ceres Seq. ID no. 13621279

SEQ ID NO: 118308 - DNA, 699 bp, Arabidopsis thaliana; identical to SEQ ID NO: 107069
  misc_feature (1)..(699): Ceres Seq. ID no. 13621280
  misc_feature (1)..(699): Ortholog of  Ceres SEQ ID NO 13594979 as cited in SEQ ID NO 56172

SEQ ID NO: 118309 - protein, 117 aa, Arabidopsis thaliana; identical to SEQ ID NO: 31083
  peptide (1)..(117): Ceres Seq. ID no. 13621281

SEQ ID NO: 118310 - DNA, 1201 bp, Arabidopsis thaliana; identical to SEQ ID NO: 107071
  misc_feature (1)..(1201): Ceres Seq. ID no. 13621282
  misc_feature (1)..(1201): Ortholog of  Ceres SEQ ID NO 12618176 as cited in SEQ ID NO 64489
  misc_feature (1)..(1201): Ortholog of  Ceres SEQ ID NO 15179231 as cited in SEQ ID NO 0

SEQ ID NO: 118311 - protein, 290 aa, Arabidopsis thaliana; identical to SEQ ID NO: 25215
  peptide (1)..(290): Ceres Seq. ID no. 13621283

SEQ ID NO: 118312 - protein, 223 aa, Arabidopsis thaliana; identical to SEQ ID NO: 25216
  peptide (1)..(223): Ceres Seq. ID no. 13621284

SEQ ID NO: 118313 - protein, 213 aa, Arabidopsis thaliana; identical to SEQ ID NO: 25217
  peptide (1)..(213): Ceres Seq. ID no. 13621285

SEQ ID NO: 118314 - DNA, 1010 bp, Arabidopsis thaliana; identical to SEQ ID NO: 107075
  misc_feature (1)..(1010): Ceres Seq. ID no. 13621286
  misc_feature (1)..(1010): Ortholog of  Ceres SEQ ID NO 13639246 as cited in SEQ ID NO 56576

SEQ ID NO: 118315 - protein, 227 aa, Arabidopsis thaliana; identical to SEQ ID NO: 107076
  peptide (1)..(227): Ceres Seq. ID no. 13621287

SEQ ID NO: 118316 - protein, 199 aa, Arabidopsis thaliana; identical to SEQ ID NO: 107077
  peptide (1)..(199): Ceres Seq. ID no. 13621288

SEQ ID NO: 118317 - protein, 186 aa, Arabidopsis thaliana; identical to SEQ ID NO: 107078
  peptide (1)..(186): Ceres Seq. ID no. 13621289

SEQ ID NO: 118318 - DNA, 1046 bp, Arabidopsis thaliana; identical to SEQ ID NO: 107079
  misc_feature (1)..(1046): Ceres Seq. ID no. 13621290
  misc_feature (1)..(1046): Ortholog of  Ceres SEQ ID NO 14315518 as cited in SEQ ID NO 60467
  misc_feature (1)..(1046): Ortholog of  Ceres SEQ ID NO 12585444 as cited in SEQ ID NO 62814

SEQ ID NO: 118319 - protein, 295 aa, Arabidopsis thaliana; identical to SEQ ID NO: 107080
  peptide (1)..(295): Ceres Seq. ID no. 13621291

SEQ ID NO: 118320 - DNA, 1193 bp, Arabidopsis thaliana; identical to SEQ ID NO: 107081
  misc_feature (1)..(1193): Ceres Seq. ID no. 13621296
  misc_feature (1)..(1193): Ortholog of  Ceres SEQ ID NO 15227018 as cited in SEQ ID NO 0

SEQ ID NO: 118321 - protein, 343 aa, Arabidopsis thaliana; identical to SEQ ID NO: 103663
  peptide (1)..(343): Ceres Seq. ID no. 13621297

SEQ ID NO: 118322 - protein, 317 aa, Arabidopsis thaliana; identical to SEQ ID NO: 103664
  peptide (1)..(317): Ceres Seq. ID no. 13621298

SEQ ID NO: 118323 - protein, 297 aa, Arabidopsis thaliana; identical to SEQ ID NO: 103665
  peptide (1)..(297): Ceres Seq. ID no. 13621299

SEQ ID NO: 118324 - DNA, 1204 bp, Arabidopsis thaliana; identical to SEQ ID NO: 107085
  misc_feature (1)..(1204): Ceres Seq. ID no. 13621324
  misc_feature (1)..(1204): Ortholog of  Ceres SEQ ID NO 12609146 as cited in SEQ ID NO 52118
  misc_feature (1)..(1204): Ortholog of  Ceres SEQ ID NO 14316158 as cited in SEQ ID NO 52413
  misc_feature (1)..(1204): Ortholog of  Ceres SEQ ID NO 13638136 as cited in SEQ ID NO 58644
  misc_feature (1)..(1204): Ortholog of  Ceres SEQ ID NO 13596868 as cited in SEQ ID NO 62806
  misc_feature (1)..(1204): Ortholog of  Ceres SEQ ID NO 12587035 as cited in SEQ ID NO 63605
  misc_feature (1)..(1204): Ortholog of  Ceres SEQ ID NO 13595885 as cited in SEQ ID NO 69265
  misc_feature (1)..(1204): Ortholog of  Ceres SEQ ID NO 12566239 as cited in SEQ ID NO 0
  misc_feature (1)..(1204): Ortholog of  Ceres SEQ ID NO 13599119 as cited in SEQ ID NO 0

SEQ ID NO: 118325 - protein, 390 aa, Arabidopsis thaliana; identical to SEQ ID NO: 107086
  peptide (1)..(390): Ceres Seq. ID no. 13621325

SEQ ID NO: 118326 - protein, 367 aa, Arabidopsis thaliana; identical to SEQ ID NO: 107087
  peptide (1)..(367): Ceres Seq. ID no. 13621326

SEQ ID NO: 118327 - protein, 361 aa, Arabidopsis thaliana; identical to SEQ ID NO: 107088
  peptide (1)..(361): Ceres Seq. ID no. 13621327

SEQ ID NO: 118328 - DNA, 2838 bp, Arabidopsis thaliana; identical to SEQ ID NO: 107089
  misc_feature (1)..(2838): Ceres Seq. ID no. 13621339
  misc_feature (1)..(2838): Ortholog of  Ceres SEQ ID NO 15168405 as cited in SEQ ID NO 56980

SEQ ID NO: 118329 - protein, 945 aa, Arabidopsis thaliana; identical to SEQ ID NO: 107090
  peptide (1)..(945): Ceres Seq. ID no. 13621340

SEQ ID NO: 118330 - protein, 821 aa, Arabidopsis thaliana; identical to SEQ ID NO: 107091
  peptide (1)..(821): Ceres Seq. ID no. 13621341

SEQ ID NO: 118331 - protein, 810 aa, Arabidopsis thaliana; identical to SEQ ID NO: 107092
  peptide (1)..(810): Ceres Seq. ID no. 13621342

SEQ ID NO: 118332 - DNA, 752 bp, Arabidopsis thaliana; identical to SEQ ID NO: 107093
  misc_feature (1)..(752): Ceres Seq. ID no. 13621347
  misc_feature (1)..(752): Ortholog of  Ceres SEQ ID NO 12600643 as cited in SEQ ID NO 20529

SEQ ID NO: 118333 - protein, 133 aa, Arabidopsis thaliana; identical to SEQ ID NO: 20530
  peptide (1)..(133): Ceres Seq. ID no. 13621348

SEQ ID NO: 118334 - protein, 98 aa, Arabidopsis thaliana; identical to SEQ ID NO: 20531
  peptide (1)..(98): Ceres Seq. ID no. 13621349

SEQ ID NO: 118335 - protein, 87 aa, Arabidopsis thaliana; identical to SEQ ID NO: 20532
  peptide (1)..(87): Ceres Seq. ID no. 13621350

SEQ ID NO: 118336 - DNA, 1252 bp, Arabidopsis thaliana; identical to SEQ ID NO: 107097
  misc_feature (1)..(1252): Ceres Seq. ID no. 13621353
  misc_feature (1)..(1252): Ortholog of  Ceres SEQ ID NO 12578315 as cited in SEQ ID NO 62451
  misc_feature (1)..(1252): Ortholog of  Ceres SEQ ID NO 13597295 as cited in SEQ ID NO 63743
  misc_feature (1)..(1252): Ortholog of  Ceres SEQ ID NO 12617090 as cited in SEQ ID NO 64005
  misc_feature (1)..(1252): Ortholog of  Ceres SEQ ID NO 13597233 as cited in SEQ ID NO 64370
  misc_feature (1)..(1252): Ortholog of  Ceres SEQ ID NO 13584577 as cited in SEQ ID NO 65298
  misc_feature (1)..(1252): Ortholog of  Ceres SEQ ID NO 13600370 as cited in SEQ ID NO 0

SEQ ID NO: 118337 - protein, 367 aa, Arabidopsis thaliana; identical to SEQ ID NO: 107098
  peptide (1)..(367): Ceres Seq. ID no. 13621354

SEQ ID NO: 118338 - protein, 362 aa, Arabidopsis thaliana; identical to SEQ ID NO: 107099
  peptide (1)..(362): Ceres Seq. ID no. 13621355

SEQ ID NO: 118339 - protein, 308 aa, Arabidopsis thaliana; identical to SEQ ID NO: 107100
  peptide (1)..(308): Ceres Seq. ID no. 13621356

SEQ ID NO: 118340 - DNA, 1893 bp, Arabidopsis thaliana; identical to SEQ ID NO: 107101
  misc_feature (1)..(1893): Ceres Seq. ID no. 13621365
  misc_feature (1)..(1893): Ortholog of  Ceres SEQ ID NO 13598865 as cited in SEQ ID NO 0

SEQ ID NO: 118341 - protein, 594 aa, Arabidopsis thaliana; identical to SEQ ID NO: 107102
  peptide (1)..(594): Ceres Seq. ID no. 13621366

SEQ ID NO: 118342 - protein, 573 aa, Arabidopsis thaliana; identical to SEQ ID NO: 107103
  peptide (1)..(573): Ceres Seq. ID no. 13621367

SEQ ID NO: 118343 - protein, 545 aa, Arabidopsis thaliana; identical to SEQ ID NO: 107104
  peptide (1)..(545): Ceres Seq. ID no. 13621368

SEQ ID NO: 118344 - DNA, 1398 bp, Arabidopsis thaliana; identical to SEQ ID NO: 107105
  misc_feature (1)..(1398): Ceres Seq. ID no. 13621377
  misc_feature (1)..(1398): Ortholog of  Ceres SEQ ID NO 13596392 as cited in SEQ ID NO 62136
  misc_feature (1)..(1398): Ortholog of  Ceres SEQ ID NO 13654360 as cited in SEQ ID NO 67980
  misc_feature (1)..(1398): Ortholog of  Ceres SEQ ID NO 13596394 as cited in SEQ ID NO 68561

SEQ ID NO: 118345 - protein, 318 aa, Arabidopsis thaliana; identical to SEQ ID NO: 76986
  peptide (1)..(318): Ceres Seq. ID no. 13621378

SEQ ID NO: 118346 - protein, 304 aa, Arabidopsis thaliana; identical to SEQ ID NO: 76987
  peptide (1)..(304): Ceres Seq. ID no. 13621379

SEQ ID NO: 118347 - DNA, 990 bp, Arabidopsis thaliana; identical to SEQ ID NO: 107108
  misc_feature (1)..(990): Ceres Seq. ID no. 13621396
  misc_feature (1)..(990): Ortholog of  Ceres SEQ ID NO 13594193 as cited in SEQ ID NO 58558
  misc_feature (1)..(990): Ortholog of  Ceres SEQ ID NO 15177545 as cited in SEQ ID NO 0

SEQ ID NO: 118348 - protein, 168 aa, Arabidopsis thaliana; identical to SEQ ID NO: 107109
  peptide (1)..(168): Ceres Seq. ID no. 13621397
  misc_feature (10)..(10): Xaa is any aa, unknown or other
  misc_feature (21)..(21): Xaa is any aa, unknown or other
  misc_feature (36)..(36): Xaa is any aa, unknown or other
  misc_feature (45)..(45): Xaa is any aa, unknown or other
  misc_feature (46)..(46): Xaa is any aa, unknown or other

SEQ ID NO: 118349 - protein, 139 aa, Arabidopsis thaliana; identical to SEQ ID NO: 107110
  peptide (1)..(139): Ceres Seq. ID no. 13621398

SEQ ID NO: 118350 - protein, 138 aa, Arabidopsis thaliana; identical to SEQ ID NO: 107111
  peptide (1)..(138): Ceres Seq. ID no. 13621399

SEQ ID NO: 118351 - DNA, 1460 bp, Arabidopsis thaliana; identical to SEQ ID NO: 107112
  misc_feature (1)..(1460): Ceres Seq. ID no. 13621408
  misc_feature (1)..(1460): Ortholog of  Ceres SEQ ID NO 13596198 as cited in SEQ ID NO 68488

SEQ ID NO: 118352 - protein, 475 aa, Arabidopsis thaliana; identical to SEQ ID NO: 107113
  peptide (1)..(475): Ceres Seq. ID no. 13621409

SEQ ID NO: 118353 - protein, 463 aa, Arabidopsis thaliana; identical to SEQ ID NO: 107114
  peptide (1)..(463): Ceres Seq. ID no. 13621410

SEQ ID NO: 118354 - protein, 393 aa, Arabidopsis thaliana; identical to SEQ ID NO: 107115
  peptide (1)..(393): Ceres Seq. ID no. 13621411

SEQ ID NO: 118355 - DNA, 929 bp, Arabidopsis thaliana; identical to SEQ ID NO: 107116
  misc_feature (1)..(929): Ceres Seq. ID no. 13621423
  misc_feature (1)..(929): Ortholog of  Ceres SEQ ID NO 13661001 as cited in SEQ ID NO 67531

SEQ ID NO: 118356 - protein, 238 aa, Arabidopsis thaliana; identical to SEQ ID NO: 107117
  peptide (1)..(238): Ceres Seq. ID no. 13621424

SEQ ID NO: 118357 - protein, 184 aa, Arabidopsis thaliana; identical to SEQ ID NO: 107118
  peptide (1)..(184): Ceres Seq. ID no. 13621425

SEQ ID NO: 118358 - protein, 172 aa, Arabidopsis thaliana; identical to SEQ ID NO: 107119
  peptide (1)..(172): Ceres Seq. ID no. 13621426

SEQ ID NO: 118359 - DNA, 1295 bp, Arabidopsis thaliana; identical to SEQ ID NO: 107120
  misc_feature (1)..(1295): Ceres Seq. ID no. 13621451
  misc_feature (1)..(1295): Ortholog of  Ceres SEQ ID NO 13502952 as cited in SEQ ID NO 62271
  misc_feature (1)..(1295): Ortholog of  Ceres SEQ ID NO 13502973 as cited in SEQ ID NO 68052
  misc_feature (1)..(1295): Ortholog of  Ceres SEQ ID NO 13596000 as cited in SEQ ID NO 68188

SEQ ID NO: 118360 - protein, 383 aa, Arabidopsis thaliana; identical to SEQ ID NO: 107121
  peptide (1)..(383): Ceres Seq. ID no. 13621452

SEQ ID NO: 118361 - protein, 367 aa, Arabidopsis thaliana; identical to SEQ ID NO: 107122
  peptide (1)..(367): Ceres Seq. ID no. 13621453

SEQ ID NO: 118362 - protein, 313 aa, Arabidopsis thaliana; identical to SEQ ID NO: 107123
  peptide (1)..(313): Ceres Seq. ID no. 13621454

SEQ ID NO: 118363 - DNA, 2701 bp, Arabidopsis thaliana; identical to SEQ ID NO: 107124
  misc_feature (1)..(2701): Ceres Seq. ID no. 13621455
  misc_feature (1)..(2701): Ortholog of  Ceres SEQ ID NO 13657677 as cited in SEQ ID NO 66119

SEQ ID NO: 118364 - protein, 851 aa, Arabidopsis thaliana; identical to SEQ ID NO: 107125
  peptide (1)..(851): Ceres Seq. ID no. 13621456

SEQ ID NO: 118365 - protein, 710 aa, Arabidopsis thaliana; identical to SEQ ID NO: 107126
  peptide (1)..(710): Ceres Seq. ID no. 13621457

SEQ ID NO: 118366 - protein, 663 aa, Arabidopsis thaliana; identical to SEQ ID NO: 107127
  peptide (1)..(663): Ceres Seq. ID no. 13621458

SEQ ID NO: 118367 - DNA, 1852 bp, Arabidopsis thaliana; identical to SEQ ID NO: 107128
  misc_feature (1)..(1852): Ceres Seq. ID no. 13621459
  misc_feature (1)..(1852): Ortholog of  Ceres SEQ ID NO 13655852 as cited in SEQ ID NO 64636

SEQ ID NO: 118368 - protein, 454 aa, Arabidopsis thaliana; identical to SEQ ID NO: 20963
  peptide (1)..(454): Ceres Seq. ID no. 13621460

SEQ ID NO: 118369 - protein, 443 aa, Arabidopsis thaliana; identical to SEQ ID NO: 20964
  peptide (1)..(443): Ceres Seq. ID no. 13621461

SEQ ID NO: 118370 - protein, 316 aa, Arabidopsis thaliana; identical to SEQ ID NO: 20965
  peptide (1)..(316): Ceres Seq. ID no. 13621462

SEQ ID NO: 118371 - DNA, 1251 bp, Arabidopsis thaliana; identical to SEQ ID NO: 107132
  misc_feature (1)..(1251): Ceres Seq. ID no. 13621467
  misc_feature (1)..(1251): Ortholog of  Ceres SEQ ID NO 14305461 as cited in SEQ ID NO 57996
  misc_feature (1)..(1251): Ortholog of  Ceres SEQ ID NO 15174376 as cited in SEQ ID NO 0
  misc_feature (1)..(1251): Ortholog of  Ceres SEQ ID NO 15178108 as cited in SEQ ID NO 0

SEQ ID NO: 118372 - protein, 146 aa, Arabidopsis thaliana; identical to SEQ ID NO: 21432
  peptide (1)..(146): Ceres Seq. ID no. 13621468

SEQ ID NO: 118373 - protein, 141 aa, Arabidopsis thaliana; identical to SEQ ID NO: 21433
  peptide (1)..(141): Ceres Seq. ID no. 13621469

SEQ ID NO: 118374 - protein, 117 aa, Arabidopsis thaliana; identical to SEQ ID NO: 21434
  peptide (1)..(117): Ceres Seq. ID no. 13621470

SEQ ID NO: 118375 - DNA, 776 bp, Arabidopsis thaliana; identical to SEQ ID NO: 107136
  misc_feature (1)..(776): Ceres Seq. ID no. 13621471
  misc_feature (1)..(776): Ortholog of  Ceres SEQ ID NO 13595704 as cited in SEQ ID NO 51001
  misc_feature (1)..(776): Ortholog of  Ceres SEQ ID NO 13638279 as cited in SEQ ID NO 57674
  misc_feature (1)..(776): Ortholog of  Ceres SEQ ID NO 15177534 as cited in SEQ ID NO 0

SEQ ID NO: 118376 - protein, 211 aa, Arabidopsis thaliana; identical to SEQ ID NO: 107137
  peptide (1)..(211): Ceres Seq. ID no. 13621472

SEQ ID NO: 118377 - protein, 193 aa, Arabidopsis thaliana; identical to SEQ ID NO: 107138
  peptide (1)..(193): Ceres Seq. ID no. 13621473

SEQ ID NO: 118378 - protein, 155 aa, Arabidopsis thaliana; identical to SEQ ID NO: 107139
  peptide (1)..(155): Ceres Seq. ID no. 13621474

SEQ ID NO: 118379 - DNA, 1395 bp, Arabidopsis thaliana; identical to SEQ ID NO: 107140
  misc_feature (1)..(1395): Ceres Seq. ID no. 13621479
  misc_feature (1)..(1395): Ortholog of  Ceres SEQ ID NO 13639663 as cited in SEQ ID NO 57850

SEQ ID NO: 118380 - protein, 346 aa, Arabidopsis thaliana; identical to SEQ ID NO: 23911
  peptide (1)..(346): Ceres Seq. ID no. 13621480

SEQ ID NO: 118381 - protein, 236 aa, Arabidopsis thaliana; identical to SEQ ID NO: 23912
  peptide (1)..(236): Ceres Seq. ID no. 13621481

SEQ ID NO: 118382 - protein, 234 aa, Arabidopsis thaliana; identical to SEQ ID NO: 23913
  peptide (1)..(234): Ceres Seq. ID no. 13621482

SEQ ID NO: 118383 - DNA, 1904 bp, Arabidopsis thaliana; identical to SEQ ID NO: 107144
  misc_feature (1)..(1904): Ceres Seq. ID no. 13621491
  misc_feature (1)..(1904): Ortholog of  Ceres SEQ ID NO 14311854 as cited in SEQ ID NO 51455
  misc_feature (1)..(1904): Ortholog of  Ceres SEQ ID NO 14313097 as cited in SEQ ID NO 58902

SEQ ID NO: 118384 - protein, 361 aa, Arabidopsis thaliana; identical to SEQ ID NO: 39815
  peptide (1)..(361): Ceres Seq. ID no. 13621492

SEQ ID NO: 118385 - protein, 357 aa, Arabidopsis thaliana; identical to SEQ ID NO: 39816
  peptide (1)..(357): Ceres Seq. ID no. 13621493

SEQ ID NO: 118386 - DNA, 1762 bp, Arabidopsis thaliana; identical to SEQ ID NO: 107147
  misc_feature (1)..(1762): Ceres Seq. ID no. 13621498
  misc_feature (1)..(1762): Ortholog of  Ceres SEQ ID NO 13639120 as cited in SEQ ID NO 56708

SEQ ID NO: 118387 - protein, 460 aa, Arabidopsis thaliana; identical to SEQ ID NO: 39965
  peptide (1)..(460): Ceres Seq. ID no. 13621499

SEQ ID NO: 118388 - protein, 443 aa, Arabidopsis thaliana; identical to SEQ ID NO: 39966
  peptide (1)..(443): Ceres Seq. ID no. 13621500

SEQ ID NO: 118389 - protein, 268 aa, Arabidopsis thaliana; identical to SEQ ID NO: 39967
  peptide (1)..(268): Ceres Seq. ID no. 13621501

SEQ ID NO: 118390 - DNA, 1698 bp, Arabidopsis thaliana; identical to SEQ ID NO: 107151
  misc_feature (1)..(1698): Ceres Seq. ID no. 13621506
  misc_feature (1)..(1698): Ortholog of  Ceres SEQ ID NO 15176911 as cited in SEQ ID NO 54868
  misc_feature (1)..(1698): Ortholog of  Ceres SEQ ID NO 13596433 as cited in SEQ ID NO 68721
  misc_feature (1)..(1698): Ortholog of  Ceres SEQ ID NO 13599169 as cited in SEQ ID NO 0

SEQ ID NO: 118391 - protein, 445 aa, Arabidopsis thaliana; identical to SEQ ID NO: 107152
  peptide (1)..(445): Ceres Seq. ID no. 13621507

SEQ ID NO: 118392 - protein, 411 aa, Arabidopsis thaliana; identical to SEQ ID NO: 107153
  peptide (1)..(411): Ceres Seq. ID no. 13621508

SEQ ID NO: 118393 - protein, 408 aa, Arabidopsis thaliana; identical to SEQ ID NO: 107154
  peptide (1)..(408): Ceres Seq. ID no. 13621509

SEQ ID NO: 118394 - DNA, 1047 bp, Arabidopsis thaliana; identical to SEQ ID NO: 107155
  misc_feature (1)..(1047): Ceres Seq. ID no. 13621510
  misc_feature (1)..(1047): Ortholog of  Ceres SEQ ID NO 15227018 as cited in SEQ ID NO 0

SEQ ID NO: 118395 - protein, 348 aa, Arabidopsis thaliana; identical to SEQ ID NO: 107156
  peptide (1)..(348): Ceres Seq. ID no. 13621511

SEQ ID NO: 118396 - protein, 347 aa, Arabidopsis thaliana; identical to SEQ ID NO: 107157
  peptide (1)..(347): Ceres Seq. ID no. 13621512

SEQ ID NO: 118397 - protein, 305 aa, Arabidopsis thaliana; identical to SEQ ID NO: 107158
  peptide (1)..(305): Ceres Seq. ID no. 13621513

SEQ ID NO: 118398 - DNA, 2321 bp, Arabidopsis thaliana; identical to SEQ ID NO: 107159
  misc_feature (1)..(2321): Ceres Seq. ID no. 13621516
  misc_feature (1)..(2321): Ortholog of  Ceres SEQ ID NO 12778278 as cited in SEQ ID NO 63035

SEQ ID NO: 118399 - protein, 594 aa, Arabidopsis thaliana; identical to SEQ ID NO: 29941
  peptide (1)..(594): Ceres Seq. ID no. 13621517

SEQ ID NO: 118400 - protein, 495 aa, Arabidopsis thaliana; identical to SEQ ID NO: 29942
  peptide (1)..(495): Ceres Seq. ID no. 13621518

SEQ ID NO: 118401 - protein, 480 aa, Arabidopsis thaliana; identical to SEQ ID NO: 29943
  peptide (1)..(480): Ceres Seq. ID no. 13621519

SEQ ID NO: 118402 - DNA, 1756 bp, Arabidopsis thaliana; identical to SEQ ID NO: 107163
  misc_feature (1)..(1756): Ceres Seq. ID no. 13621524
  misc_feature (1)..(1756): Ortholog of  Ceres SEQ ID NO 13654989 as cited in SEQ ID NO 63117
  misc_feature (1)..(1756): Ortholog of  Ceres SEQ ID NO 13584744 as cited in SEQ ID NO 69137

SEQ ID NO: 118403 - protein, 432 aa, Arabidopsis thaliana; identical to SEQ ID NO: 107164
  peptide (1)..(432): Ceres Seq. ID no. 13621525

SEQ ID NO: 118404 - protein, 330 aa, Arabidopsis thaliana; identical to SEQ ID NO: 107165
  peptide (1)..(330): Ceres Seq. ID no. 13621526

SEQ ID NO: 118405 - protein, 312 aa, Arabidopsis thaliana; identical to SEQ ID NO: 107166
  peptide (1)..(312): Ceres Seq. ID no. 13621527

SEQ ID NO: 118406 - DNA, 1183 bp, Arabidopsis thaliana; identical to SEQ ID NO: 107167
  misc_feature (1)..(1183): Ceres Seq. ID no. 13621528
  misc_feature (1)..(1183): Ortholog of  Ceres SEQ ID NO 13654285 as cited in SEQ ID NO 68661

SEQ ID NO: 118407 - protein, 314 aa, Arabidopsis thaliana; identical to SEQ ID NO: 107168
  peptide (1)..(314): Ceres Seq. ID no. 13621529

SEQ ID NO: 118408 - protein, 221 aa, Arabidopsis thaliana; identical to SEQ ID NO: 107169
  peptide (1)..(221): Ceres Seq. ID no. 13621530

SEQ ID NO: 118409 - DNA, 1322 bp, Arabidopsis thaliana; identical to SEQ ID NO: 107170
  misc_feature (1)..(1322): Ceres Seq. ID no. 13621535
  misc_feature (1)..(1322): Ortholog of  Ceres SEQ ID NO 14311463 as cited in SEQ ID NO 51400

SEQ ID NO: 118410 - protein, 270 aa, Arabidopsis thaliana; identical to SEQ ID NO: 107171
  peptide (1)..(270): Ceres Seq. ID no. 13621536

SEQ ID NO: 118411 - protein, 237 aa, Arabidopsis thaliana; identical to SEQ ID NO: 107172
  peptide (1)..(237): Ceres Seq. ID no. 13621537

SEQ ID NO: 118412 - protein, 164 aa, Arabidopsis thaliana; identical to SEQ ID NO: 36863
  peptide (1)..(164): Ceres Seq. ID no. 13621538

SEQ ID NO: 118413 - DNA, 1027 bp, Arabidopsis thaliana; identical to SEQ ID NO: 107174
  misc_feature (1)..(1027): Ceres Seq. ID no. 13621550
  misc_feature (1)..(1027): Ortholog of  Ceres SEQ ID NO 14313599 as cited in SEQ ID NO 54989
  misc_feature (1)..(1027): Ortholog of  Ceres SEQ ID NO 15176204 as cited in SEQ ID NO 55608
  misc_feature (1)..(1027): Ortholog of  Ceres SEQ ID NO 15225111 as cited in SEQ ID NO 58444
  misc_feature (1)..(1027): Ortholog of  Ceres SEQ ID NO 14313064 as cited in SEQ ID NO 59543
  misc_feature (1)..(1027): Ortholog of  Ceres SEQ ID NO 13661001 as cited in SEQ ID NO 67531
  misc_feature (1)..(1027): Ortholog of  Ceres SEQ ID NO 15178920 as cited in SEQ ID NO 0

SEQ ID NO: 118414 - protein, 226 aa, Arabidopsis thaliana; identical to SEQ ID NO: 106225
  peptide (1)..(226): Ceres Seq. ID no. 13621551

SEQ ID NO: 118415 - protein, 200 aa, Arabidopsis thaliana; identical to SEQ ID NO: 106226
  peptide (1)..(200): Ceres Seq. ID no. 13621552

SEQ ID NO: 118416 - protein, 140 aa, Arabidopsis thaliana; identical to SEQ ID NO: 106227
  peptide (1)..(140): Ceres Seq. ID no. 13621553

SEQ ID NO: 118417 - DNA, 1060 bp, Arabidopsis thaliana; identical to SEQ ID NO: 107178
  misc_feature (1)..(1060): Ceres Seq. ID no. 13621598
  misc_feature (1)..(1060): Ortholog of  Ceres SEQ ID NO 13595775 as cited in SEQ ID NO 60203

SEQ ID NO: 118418 - protein, 310 aa, Arabidopsis thaliana; identical to SEQ ID NO: 107179
  peptide (1)..(310): Ceres Seq. ID no. 13621599

SEQ ID NO: 118419 - protein, 190 aa, Arabidopsis thaliana; identical to SEQ ID NO: 107180
  peptide (1)..(190): Ceres Seq. ID no. 13621600

SEQ ID NO: 118420 - protein, 179 aa, Arabidopsis thaliana; identical to SEQ ID NO: 107181
  peptide (1)..(179): Ceres Seq. ID no. 13621601

SEQ ID NO: 118421 - DNA, 917 bp, Arabidopsis thaliana; identical to SEQ ID NO: 107182
  misc_feature (1)..(917): Ceres Seq. ID no. 13621642
  misc_feature (1)..(917): Ortholog of  Ceres SEQ ID NO 13638849 as cited in SEQ ID NO 52046
  misc_feature (1)..(917): Ortholog of  Ceres SEQ ID NO 13599613 as cited in SEQ ID NO 0

SEQ ID NO: 118422 - protein, 272 aa, Arabidopsis thaliana; identical to SEQ ID NO: 107183
  peptide (1)..(272): Ceres Seq. ID no. 13621643

SEQ ID NO: 118423 - protein, 265 aa, Arabidopsis thaliana; identical to SEQ ID NO: 107184
  peptide (1)..(265): Ceres Seq. ID no. 13621644

SEQ ID NO: 118424 - protein, 218 aa, Arabidopsis thaliana; identical to SEQ ID NO: 107185
  peptide (1)..(218): Ceres Seq. ID no. 13621645

SEQ ID NO: 118425 - DNA, 2762 bp, Arabidopsis thaliana; identical to SEQ ID NO: 107186
  misc_feature (1)..(2762): Ceres Seq. ID no. 13621646
  misc_feature (1)..(2762): Ortholog of  Ceres SEQ ID NO 12607856 as cited in SEQ ID NO 55419

SEQ ID NO: 118426 - protein, 707 aa, Arabidopsis thaliana; identical to SEQ ID NO: 107187
  peptide (1)..(707): Ceres Seq. ID no. 13621647

SEQ ID NO: 118427 - protein, 700 aa, Arabidopsis thaliana; identical to SEQ ID NO: 107188
  peptide (1)..(700): Ceres Seq. ID no. 13621648

SEQ ID NO: 118428 - protein, 651 aa, Arabidopsis thaliana; identical to SEQ ID NO: 107189
  peptide (1)..(651): Ceres Seq. ID no. 13621649

SEQ ID NO: 118429 - DNA, 1388 bp, Arabidopsis thaliana; identical to SEQ ID NO: 107190
  misc_feature (1)..(1388): Ceres Seq. ID no. 13621654
  misc_feature (1)..(1388): Ortholog of  Ceres SEQ ID NO 12336358 as cited in SEQ ID NO 20733
  misc_feature (1)..(1388): Ortholog of  Ceres SEQ ID NO 12623467 as cited in SEQ ID NO 60951
  misc_feature (1)..(1388): Ortholog of  Ceres SEQ ID NO 14309133 as cited in SEQ ID NO 0

SEQ ID NO: 118430 - protein, 336 aa, Arabidopsis thaliana; identical to SEQ ID NO: 107191
  peptide (1)..(336): Ceres Seq. ID no. 13621655

SEQ ID NO: 118431 - protein, 334 aa, Arabidopsis thaliana; identical to SEQ ID NO: 107192
  peptide (1)..(334): Ceres Seq. ID no. 13621656

SEQ ID NO: 118432 - protein, 314 aa, Arabidopsis thaliana; identical to SEQ ID NO: 107193
  peptide (1)..(314): Ceres Seq. ID no. 13621657

SEQ ID NO: 118433 - DNA, 1703 bp, Arabidopsis thaliana; identical to SEQ ID NO: 107194
  misc_feature (1)..(1703): Ceres Seq. ID no. 13621668
  misc_feature (1)..(1703): Ortholog of  Ceres SEQ ID NO 13659033 as cited in SEQ ID NO 66372
  misc_feature (1)..(1703): Ortholog of  Ceres SEQ ID NO 13655724 as cited in SEQ ID NO 68973
  misc_feature (1)..(1703): Ortholog of  Ceres SEQ ID NO 12625899 as cited in SEQ ID NO 69079

SEQ ID NO: 118434 - protein, 487 aa, Arabidopsis thaliana; identical to SEQ ID NO: 107195
  peptide (1)..(487): Ceres Seq. ID no. 13621669

SEQ ID NO: 118435 - protein, 471 aa, Arabidopsis thaliana; identical to SEQ ID NO: 74247
  peptide (1)..(471): Ceres Seq. ID no. 13621670

SEQ ID NO: 118436 - protein, 447 aa, Arabidopsis thaliana; identical to SEQ ID NO: 74248
  peptide (1)..(447): Ceres Seq. ID no. 13621671

SEQ ID NO: 118437 - DNA, 863 bp, Arabidopsis thaliana; identical to SEQ ID NO: 107198
  misc_feature (1)..(863): Ceres Seq. ID no. 13621680
  misc_feature (1)..(863): Ortholog of  Ceres SEQ ID NO 13504265 as cited in SEQ ID NO 85

SEQ ID NO: 118438 - protein, 241 aa, Arabidopsis thaliana; identical to SEQ ID NO: 107199
  peptide (1)..(241): Ceres Seq. ID no. 13621681

SEQ ID NO: 118439 - protein, 216 aa, Arabidopsis thaliana; identical to SEQ ID NO: 107200
  peptide (1)..(216): Ceres Seq. ID no. 13621682

SEQ ID NO: 118440 - protein, 209 aa, Arabidopsis thaliana; identical to SEQ ID NO: 107201
  peptide (1)..(209): Ceres Seq. ID no. 13621683

SEQ ID NO: 118441 - DNA, 1070 bp, Arabidopsis thaliana; identical to SEQ ID NO: 107202
  misc_feature (1)..(1070): Ceres Seq. ID no. 13621692
  misc_feature (1)..(1070): Ortholog of  Ceres SEQ ID NO 13597234 as cited in SEQ ID NO 64118

SEQ ID NO: 118442 - protein, 249 aa, Arabidopsis thaliana; identical to SEQ ID NO: 107203
  peptide (1)..(249): Ceres Seq. ID no. 13621693

SEQ ID NO: 118443 - protein, 207 aa, Arabidopsis thaliana; identical to SEQ ID NO: 107204
  peptide (1)..(207): Ceres Seq. ID no. 13621694

SEQ ID NO: 118444 - DNA, 1561 bp, Arabidopsis thaliana; identical to SEQ ID NO: 107205
  misc_feature (1)..(1561): Ceres Seq. ID no. 13621695
  misc_feature (1)..(1561): Ortholog of  Ceres SEQ ID NO 13595932 as cited in SEQ ID NO 67810

SEQ ID NO: 118445 - protein, 403 aa, Arabidopsis thaliana; identical to SEQ ID NO: 107206
  peptide (1)..(403): Ceres Seq. ID no. 13621696

SEQ ID NO: 118446 - protein, 323 aa, Arabidopsis thaliana; identical to SEQ ID NO: 107207
  peptide (1)..(323): Ceres Seq. ID no. 13621697

SEQ ID NO: 118447 - protein, 281 aa, Arabidopsis thaliana; identical to SEQ ID NO: 107208
  peptide (1)..(281): Ceres Seq. ID no. 13621698

SEQ ID NO: 118448 - DNA, 1803 bp, Arabidopsis thaliana; identical to SEQ ID NO: 107209
  misc_feature (1)..(1803): Ceres Seq. ID no. 13621714
  misc_feature (1)..(1803): Ortholog of  Ceres SEQ ID NO 13654989 as cited in SEQ ID NO 63117
  misc_feature (1)..(1803): Ortholog of  Ceres SEQ ID NO 13584744 as cited in SEQ ID NO 69137

SEQ ID NO: 118449 - protein, 476 aa, Arabidopsis thaliana; identical to SEQ ID NO: 107210
  peptide (1)..(476): Ceres Seq. ID no. 13621715

SEQ ID NO: 118450 - protein, 453 aa, Arabidopsis thaliana; identical to SEQ ID NO: 107211
  peptide (1)..(453): Ceres Seq. ID no. 13621716

SEQ ID NO: 118451 - protein, 452 aa, Arabidopsis thaliana; identical to SEQ ID NO: 107212
  peptide (1)..(452): Ceres Seq. ID no. 13621717

SEQ ID NO: 118452 - DNA, 2339 bp, Arabidopsis thaliana; identical to SEQ ID NO: 107213
  misc_feature (1)..(2339): Ceres Seq. ID no. 13621726
  misc_feature (1)..(2339): Ortholog of  Ceres SEQ ID NO 13598865 as cited in SEQ ID NO 0

SEQ ID NO: 118453 - protein, 658 aa, Arabidopsis thaliana; identical to SEQ ID NO: 107214
  peptide (1)..(658): Ceres Seq. ID no. 13621727

SEQ ID NO: 118454 - protein, 582 aa, Arabidopsis thaliana; identical to SEQ ID NO: 107215
  peptide (1)..(582): Ceres Seq. ID no. 13621728

SEQ ID NO: 118455 - protein, 574 aa, Arabidopsis thaliana; identical to SEQ ID NO: 107216
  peptide (1)..(574): Ceres Seq. ID no. 13621729

SEQ ID NO: 118456 - DNA, 1510 bp, Arabidopsis thaliana; identical to SEQ ID NO: 107217
  misc_feature (1)..(1510): Ceres Seq. ID no. 13621751
  misc_feature (1)..(1510): Ortholog of  Ceres SEQ ID NO 13581327 as cited in SEQ ID NO 51165
  misc_feature (1)..(1510): Ortholog of  Ceres SEQ ID NO 12610002 as cited in SEQ ID NO 55823
  misc_feature (1)..(1510): Ortholog of  Ceres SEQ ID NO 14308310 as cited in SEQ ID NO 58573
  misc_feature (1)..(1510): Ortholog of  Ceres SEQ ID NO 14308795 as cited in SEQ ID NO 59140
  misc_feature (1)..(1510): Ortholog of  Ceres SEQ ID NO 14313354 as cited in SEQ ID NO 61520
  misc_feature (1)..(1510): Ortholog of  Ceres SEQ ID NO 13596744 as cited in SEQ ID NO 62765

SEQ ID NO: 118457 - protein, 349 aa, Arabidopsis thaliana; identical to SEQ ID NO: 27656
  peptide (1)..(349): Ceres Seq. ID no. 13621752

SEQ ID NO: 118458 - protein, 263 aa, Arabidopsis thaliana; identical to SEQ ID NO: 27657
  peptide (1)..(263): Ceres Seq. ID no. 13621753

SEQ ID NO: 118459 - protein, 204 aa, Arabidopsis thaliana; identical to SEQ ID NO: 27658
  peptide (1)..(204): Ceres Seq. ID no. 13621754

SEQ ID NO: 118460 - DNA, 1725 bp, Arabidopsis thaliana; identical to SEQ ID NO: 107221
  misc_feature (1)..(1725): Ceres Seq. ID no. 13621757
  misc_feature (1)..(1725): Ortholog of  Ceres SEQ ID NO 13594209 as cited in SEQ ID NO 59089
  misc_feature (1)..(1725): Ortholog of  Ceres SEQ ID NO 13502874 as cited in SEQ ID NO 66298
  misc_feature (1)..(1725): Ortholog of  Ceres SEQ ID NO 12614124 as cited in SEQ ID NO 68392

SEQ ID NO: 118461 - protein, 511 aa, Arabidopsis thaliana; identical to SEQ ID NO: 107222
  peptide (1)..(511): Ceres Seq. ID no. 13621758

SEQ ID NO: 118462 - protein, 502 aa, Arabidopsis thaliana; identical to SEQ ID NO: 107223
  peptide (1)..(502): Ceres Seq. ID no. 13621759

SEQ ID NO: 118463 - protein, 438 aa, Arabidopsis thaliana; identical to SEQ ID NO: 107224
  peptide (1)..(438): Ceres Seq. ID no. 13621760

SEQ ID NO: 118464 - DNA, 1509 bp, Arabidopsis thaliana; identical to SEQ ID NO: 107225
  misc_feature (1)..(1509): Ceres Seq. ID no. 13621765
  misc_feature (1)..(1509): Ortholog of  Ceres SEQ ID NO 13599900 as cited in SEQ ID NO 531
  misc_feature (1)..(1509): Ortholog of  Ceres SEQ ID NO 14310498 as cited in SEQ ID NO 55066
  misc_feature (1)..(1509): Ortholog of  Ceres SEQ ID NO 13659971 as cited in SEQ ID NO 67565
  misc_feature (1)..(1509): Ortholog of  Ceres SEQ ID NO 13500385 as cited in SEQ ID NO 67583

SEQ ID NO: 118465 - protein, 469 aa, Arabidopsis thaliana; identical to SEQ ID NO: 107226
  peptide (1)..(469): Ceres Seq. ID no. 13621766

SEQ ID NO: 118466 - protein, 413 aa, Arabidopsis thaliana; identical to SEQ ID NO: 107227
  peptide (1)..(413): Ceres Seq. ID no. 13621767

SEQ ID NO: 118467 - protein, 412 aa, Arabidopsis thaliana; identical to SEQ ID NO: 107228
  peptide (1)..(412): Ceres Seq. ID no. 13621768

SEQ ID NO: 118468 - DNA, 1741 bp, Arabidopsis thaliana; identical to SEQ ID NO: 107229
  misc_feature (1)..(1741): Ceres Seq. ID no. 13621777
  misc_feature (1)..(1741): Ortholog of  Ceres SEQ ID NO 15227091 as cited in SEQ ID NO 60294
  misc_feature (1)..(1741): Ortholog of  Ceres SEQ ID NO 13502874 as cited in SEQ ID NO 66298
  misc_feature (1)..(1741): Ortholog of  Ceres SEQ ID NO 12614124 as cited in SEQ ID NO 68392

SEQ ID NO: 118469 - protein, 536 aa, Arabidopsis thaliana; identical to SEQ ID NO: 107230
  peptide (1)..(536): Ceres Seq. ID no. 13621778

SEQ ID NO: 118470 - protein, 527 aa, Arabidopsis thaliana; identical to SEQ ID NO: 107231
  peptide (1)..(527): Ceres Seq. ID no. 13621779

SEQ ID NO: 118471 - protein, 523 aa, Arabidopsis thaliana; identical to SEQ ID NO: 107232
  peptide (1)..(523): Ceres Seq. ID no. 13621780

SEQ ID NO: 118472 - DNA, 1890 bp, Arabidopsis thaliana; identical to SEQ ID NO: 107233
  misc_feature (1)..(1890): Ceres Seq. ID no. 13621789
  misc_feature (1)..(1890): Ortholog of  Ceres SEQ ID NO 14301676 as cited in SEQ ID NO 67423

SEQ ID NO: 118473 - protein, 476 aa, Arabidopsis thaliana; identical to SEQ ID NO: 107234
  peptide (1)..(476): Ceres Seq. ID no. 13621790

SEQ ID NO: 118474 - protein, 369 aa, Arabidopsis thaliana; identical to SEQ ID NO: 107235
  peptide (1)..(369): Ceres Seq. ID no. 13621791

SEQ ID NO: 118475 - protein, 350 aa, Arabidopsis thaliana; identical to SEQ ID NO: 107236
  peptide (1)..(350): Ceres Seq. ID no. 13621792

SEQ ID NO: 118476 - DNA, 1391 bp, Arabidopsis thaliana; identical to SEQ ID NO: 107237
  misc_feature (1)..(1391): Ceres Seq. ID no. 13621797
  misc_feature (1)..(1391): Ortholog of  Ceres SEQ ID NO 15171606 as cited in SEQ ID NO 57214
  misc_feature (1)..(1391): Ortholog of  Ceres SEQ ID NO 13596921 as cited in SEQ ID NO 62368
  misc_feature (1)..(1391): Ortholog of  Ceres SEQ ID NO 13600673 as cited in SEQ ID NO 0

SEQ ID NO: 118477 - protein, 345 aa, Arabidopsis thaliana; identical to SEQ ID NO: 107238
  peptide (1)..(345): Ceres Seq. ID no. 13621798

SEQ ID NO: 118478 - protein, 338 aa, Arabidopsis thaliana; identical to SEQ ID NO: 107239
  peptide (1)..(338): Ceres Seq. ID no. 13621799

SEQ ID NO: 118479 - protein, 312 aa, Arabidopsis thaliana; identical to SEQ ID NO: 107240
  peptide (1)..(312): Ceres Seq. ID no. 13621800

SEQ ID NO: 118480 - DNA, 2166 bp, Arabidopsis thaliana; identical to SEQ ID NO: 107241
  misc_feature (1)..(2166): Ceres Seq. ID no. 13621801
  misc_feature (1)..(2166): Ortholog of  Ceres SEQ ID NO 13594037 as cited in SEQ ID NO 55666
  misc_feature (1)..(2166): Ortholog of  Ceres SEQ ID NO 13657707 as cited in SEQ ID NO 66407

SEQ ID NO: 118481 - protein, 614 aa, Arabidopsis thaliana; identical to SEQ ID NO: 107242
  peptide (1)..(614): Ceres Seq. ID no. 13621802

SEQ ID NO: 118482 - protein, 496 aa, Arabidopsis thaliana; identical to SEQ ID NO: 107243
  peptide (1)..(496): Ceres Seq. ID no. 13621803

SEQ ID NO: 118483 - protein, 396 aa, Arabidopsis thaliana; identical to SEQ ID NO: 107244
  peptide (1)..(396): Ceres Seq. ID no. 13621804

SEQ ID NO: 118484 - DNA, 760 bp, Arabidopsis thaliana; identical to SEQ ID NO: 107245
  misc_feature (1)..(760): Ceres Seq. ID no. 13621805
  misc_feature (1)..(760): Ortholog of  Ceres SEQ ID NO 14307324 as cited in SEQ ID NO 54131
  misc_feature (1)..(760): Ortholog of  Ceres SEQ ID NO 14303336 as cited in SEQ ID NO 54567

SEQ ID NO: 118485 - protein, 177 aa, Arabidopsis thaliana; identical to SEQ ID NO: 107246
  peptide (1)..(177): Ceres Seq. ID no. 13621806

SEQ ID NO: 118486 - protein, 164 aa, Arabidopsis thaliana; identical to SEQ ID NO: 71054
  peptide (1)..(164): Ceres Seq. ID no. 13621807

SEQ ID NO: 118487 - protein, 159 aa, Arabidopsis thaliana; identical to SEQ ID NO: 71055
  peptide (1)..(159): Ceres Seq. ID no. 13621808

SEQ ID NO: 118488 - DNA, 879 bp, Arabidopsis thaliana; identical to SEQ ID NO: 107249
  misc_feature (1)..(879): Ceres Seq. ID no. 13621809
  misc_feature (1)..(879): Ortholog of  Ceres SEQ ID NO 13589868 as cited in SEQ ID NO 55521
  misc_feature (1)..(879): Ortholog of  Ceres SEQ ID NO 15226426 as cited in SEQ ID NO 55985
  misc_feature (1)..(879): Ortholog of  Ceres SEQ ID NO 14312250 as cited in SEQ ID NO 59168
  misc_feature (1)..(879): Ortholog of  Ceres SEQ ID NO 15173326 as cited in SEQ ID NO 63793
  misc_feature (1)..(879): Ortholog of  Ceres SEQ ID NO 12617659 as cited in SEQ ID NO 65286
  misc_feature (1)..(879): Ortholog of  Ceres SEQ ID NO 12780566 as cited in SEQ ID NO 65822
  misc_feature (1)..(879): Ortholog of  Ceres SEQ ID NO 15179979 as cited in SEQ ID NO 0

SEQ ID NO: 118489 - protein, 182 aa, Arabidopsis thaliana; identical to SEQ ID NO: 26250
  peptide (1)..(182): Ceres Seq. ID no. 13621810

SEQ ID NO: 118490 - protein, 175 aa, Arabidopsis thaliana; identical to SEQ ID NO: 26251
  peptide (1)..(175): Ceres Seq. ID no. 13621811

SEQ ID NO: 118491 - protein, 144 aa, Arabidopsis thaliana; identical to SEQ ID NO: 26252
  peptide (1)..(144): Ceres Seq. ID no. 13621812

SEQ ID NO: 118492 - DNA, 2025 bp, Arabidopsis thaliana; identical to SEQ ID NO: 107253
  misc_feature (1)..(2025): Ceres Seq. ID no. 13621817
  misc_feature (1)..(2025): Ortholog of  Ceres SEQ ID NO 15224811 as cited in SEQ ID NO 0
  misc_feature (1)..(2025): Ortholog of  Ceres SEQ ID NO 15226156 as cited in SEQ ID NO 0

SEQ ID NO: 118493 - protein, 571 aa, Arabidopsis thaliana; identical to SEQ ID NO: 107254
  peptide (1)..(571): Ceres Seq. ID no. 13621818

SEQ ID NO: 118494 - protein, 552 aa, Arabidopsis thaliana; identical to SEQ ID NO: 107255
  peptide (1)..(552): Ceres Seq. ID no. 13621819

SEQ ID NO: 118495 - protein, 523 aa, Arabidopsis thaliana; identical to SEQ ID NO: 107256
  peptide (1)..(523): Ceres Seq. ID no. 13621820

SEQ ID NO: 118496 - DNA, 1249 bp, Arabidopsis thaliana; identical to SEQ ID NO: 107257
  misc_feature (1)..(1249): Ceres Seq. ID no. 13621829
  misc_feature (1)..(1249): Ortholog of  Ceres SEQ ID NO 13579918 as cited in SEQ ID NO 64644
  misc_feature (1)..(1249): Ortholog of  Ceres SEQ ID NO 13654122 as cited in SEQ ID NO 68192

SEQ ID NO: 118497 - protein, 339 aa, Arabidopsis thaliana; identical to SEQ ID NO: 107258
  peptide (1)..(339): Ceres Seq. ID no. 13621830

SEQ ID NO: 118498 - protein, 235 aa, Arabidopsis thaliana; identical to SEQ ID NO: 107259
  peptide (1)..(235): Ceres Seq. ID no. 13621831

SEQ ID NO: 118499 - protein, 226 aa, Arabidopsis thaliana; identical to SEQ ID NO: 107260
  peptide (1)..(226): Ceres Seq. ID no. 13621832

SEQ ID NO: 118500 - DNA, 1949 bp, Arabidopsis thaliana; identical to SEQ ID NO: 107261
  misc_feature (1)..(1949): Ceres Seq. ID no. 13621833
  misc_feature (1)..(1949): Ortholog of  Ceres SEQ ID NO 15170209 as cited in SEQ ID NO 58562
  misc_feature (1)..(1949): Ortholog of  Ceres SEQ ID NO 14315134 as cited in SEQ ID NO 59476
  misc_feature (1)..(1949): Ortholog of  Ceres SEQ ID NO 12616332 as cited in SEQ ID NO 63449
  misc_feature (1)..(1949): Ortholog of  Ceres SEQ ID NO 13597498 as cited in SEQ ID NO 64648
  misc_feature (1)..(1949): Ortholog of  Ceres SEQ ID NO 14308053 as cited in SEQ ID NO 67790

SEQ ID NO: 118501 - protein, 409 aa, Arabidopsis thaliana; identical to SEQ ID NO: 107262
  peptide (1)..(409): Ceres Seq. ID no. 13621834

SEQ ID NO: 118502 - protein, 371 aa, Arabidopsis thaliana; identical to SEQ ID NO: 107263
  peptide (1)..(371): Ceres Seq. ID no. 13621835

SEQ ID NO: 118503 - protein, 362 aa, Arabidopsis thaliana; identical to SEQ ID NO: 107264
  peptide (1)..(362): Ceres Seq. ID no. 13621836

SEQ ID NO: 118504 - DNA, 2878 bp, Arabidopsis thaliana; identical to SEQ ID NO: 107265
  misc_feature (1)..(2878): Ceres Seq. ID no. 13621849
  misc_feature (1)..(2878): Ortholog of  Ceres SEQ ID NO 15226720 as cited in SEQ ID NO 58707
  misc_feature (1)..(2878): Ortholog of  Ceres SEQ ID NO 13584744 as cited in SEQ ID NO 69137

SEQ ID NO: 118505 - protein, 894 aa, Arabidopsis thaliana; identical to SEQ ID NO: 107266
  peptide (1)..(894): Ceres Seq. ID no. 13621850

SEQ ID NO: 118506 - protein, 749 aa, Arabidopsis thaliana; identical to SEQ ID NO: 107267
  peptide (1)..(749): Ceres Seq. ID no. 13621851

SEQ ID NO: 118507 - protein, 717 aa, Arabidopsis thaliana; identical to SEQ ID NO: 107268
  peptide (1)..(717): Ceres Seq. ID no. 13621852

SEQ ID NO: 118508 - DNA, 3528 bp, Arabidopsis thaliana; identical to SEQ ID NO: 107269
  misc_feature (1)..(3528): Ceres Seq. ID no. 13621857
  misc_feature (1)..(3528): Ortholog of  Ceres SEQ ID NO 13654989 as cited in SEQ ID NO 63117
  misc_feature (1)..(3528): Ortholog of  Ceres SEQ ID NO 13657138 as cited in SEQ ID NO 65923
  misc_feature (1)..(3528): Ortholog of  Ceres SEQ ID NO 13584744 as cited in SEQ ID NO 69137

SEQ ID NO: 118509 - protein, 552 aa, Arabidopsis thaliana; identical to SEQ ID NO: 107270
  peptide (1)..(552): Ceres Seq. ID no. 13621858

SEQ ID NO: 118510 - protein, 475 aa, Arabidopsis thaliana; identical to SEQ ID NO: 107271
  peptide (1)..(475): Ceres Seq. ID no. 13621859

SEQ ID NO: 118511 - protein, 436 aa, Arabidopsis thaliana; identical to SEQ ID NO: 85988
  peptide (1)..(436): Ceres Seq. ID no. 13621860

SEQ ID NO: 118512 - DNA, 3224 bp, Arabidopsis thaliana; identical to SEQ ID NO: 107273
  misc_feature (1)..(3224): Ceres Seq. ID no. 13621869
  misc_feature (1)..(3224): Ortholog of  Ceres SEQ ID NO 14313336 as cited in SEQ ID NO 55501

SEQ ID NO: 118513 - protein, 1073 aa, Arabidopsis thaliana; identical to SEQ ID NO: 107274
  peptide (1)..(1073): Ceres Seq. ID no. 13621870

SEQ ID NO: 118514 - protein, 1030 aa, Arabidopsis thaliana; identical to SEQ ID NO: 107275
  peptide (1)..(1030): Ceres Seq. ID no. 13621871

SEQ ID NO: 118515 - protein, 786 aa, Arabidopsis thaliana; identical to SEQ ID NO: 107276
  peptide (1)..(786): Ceres Seq. ID no. 13621872

SEQ ID NO: 118516 - DNA, 963 bp, Arabidopsis thaliana; identical to SEQ ID NO: 107277
  misc_feature (1)..(963): Ceres Seq. ID no. 13621877
  misc_feature (1)..(963): Ortholog of  Ceres SEQ ID NO 13647648 as cited in SEQ ID NO 20346
  misc_feature (1)..(963): Ortholog of  Ceres SEQ ID NO 15179852 as cited in SEQ ID NO 66623

SEQ ID NO: 118517 - protein, 269 aa, Arabidopsis thaliana; identical to SEQ ID NO: 31059
  peptide (1)..(269): Ceres Seq. ID no. 13621878

SEQ ID NO: 118518 - protein, 255 aa, Arabidopsis thaliana; identical to SEQ ID NO: 31060
  peptide (1)..(255): Ceres Seq. ID no. 13621879

SEQ ID NO: 118519 - protein, 222 aa, Arabidopsis thaliana; identical to SEQ ID NO: 31061
  peptide (1)..(222): Ceres Seq. ID no. 13621880

SEQ ID NO: 118520 - DNA, 2225 bp, Arabidopsis thaliana; identical to SEQ ID NO: 107281
  misc_feature (1)..(2225): Ceres Seq. ID no. 13621881
  misc_feature (1)..(2225): Ortholog of  Ceres SEQ ID NO 12465083 as cited in SEQ ID NO 68239

SEQ ID NO: 118521 - protein, 668 aa, Arabidopsis thaliana; identical to SEQ ID NO: 97288
  peptide (1)..(668): Ceres Seq. ID no. 13621882

SEQ ID NO: 118522 - protein, 515 aa, Arabidopsis thaliana; identical to SEQ ID NO: 97289
  peptide (1)..(515): Ceres Seq. ID no. 13621883

SEQ ID NO: 118523 - protein, 510 aa, Arabidopsis thaliana; identical to SEQ ID NO: 107284
  peptide (1)..(510): Ceres Seq. ID no. 13621884

SEQ ID NO: 118524 - DNA, 971 bp, Arabidopsis thaliana; identical to SEQ ID NO: 107285
  misc_feature (1)..(971): Ceres Seq. ID no. 13621896
  misc_feature (1)..(971): Ortholog of  Ceres SEQ ID NO 13597524 as cited in SEQ ID NO 64782

SEQ ID NO: 118525 - protein, 262 aa, Arabidopsis thaliana; identical to SEQ ID NO: 107286
  peptide (1)..(262): Ceres Seq. ID no. 13621897

SEQ ID NO: 118526 - protein, 254 aa, Arabidopsis thaliana; identical to SEQ ID NO: 107287
  peptide (1)..(254): Ceres Seq. ID no. 13621898

SEQ ID NO: 118527 - protein, 163 aa, Arabidopsis thaliana; identical to SEQ ID NO: 29825
  peptide (1)..(163): Ceres Seq. ID no. 13621899

SEQ ID NO: 118528 - DNA, 1479 bp, Arabidopsis thaliana; identical to SEQ ID NO: 107289
  misc_feature (1)..(1479): Ceres Seq. ID no. 13621911
  misc_feature (1)..(1479): Ortholog of  Ceres SEQ ID NO 14313049 as cited in SEQ ID NO 54099
  misc_feature (1)..(1479): Ortholog of  Ceres SEQ ID NO 14314054 as cited in SEQ ID NO 56939
  misc_feature (1)..(1479): Ortholog of  Ceres SEQ ID NO 13503468 as cited in SEQ ID NO 63271
  misc_feature (1)..(1479): Ortholog of  Ceres SEQ ID NO 14303592 as cited in SEQ ID NO 68603

SEQ ID NO: 118529 - protein, 451 aa, Arabidopsis thaliana; identical to SEQ ID NO: 107290
  peptide (1)..(451): Ceres Seq. ID no. 13621912

SEQ ID NO: 118530 - protein, 261 aa, Arabidopsis thaliana; identical to SEQ ID NO: 107291
  peptide (1)..(261): Ceres Seq. ID no. 13621913

SEQ ID NO: 118531 - protein, 238 aa, Arabidopsis thaliana; identical to SEQ ID NO: 107292
  peptide (1)..(238): Ceres Seq. ID no. 13621914

SEQ ID NO: 118532 - DNA, 1600 bp, Arabidopsis thaliana; identical to SEQ ID NO: 107293
  misc_feature (1)..(1600): Ceres Seq. ID no. 13622039
  misc_feature (1)..(1600): Ortholog of  Ceres SEQ ID NO 14314896 as cited in SEQ ID NO 54010

SEQ ID NO: 118533 - protein, 449 aa, Arabidopsis thaliana; identical to SEQ ID NO: 27284
  peptide (1)..(449): Ceres Seq. ID no. 13622040

SEQ ID NO: 118534 - protein, 401 aa, Arabidopsis thaliana; identical to SEQ ID NO: 21437
  peptide (1)..(401): Ceres Seq. ID no. 13622041

SEQ ID NO: 118535 - protein, 348 aa, Arabidopsis thaliana; identical to SEQ ID NO: 21438
  peptide (1)..(348): Ceres Seq. ID no. 13622042

SEQ ID NO: 118536 - DNA, 1272 bp, Arabidopsis thaliana; identical to SEQ ID NO: 107297
  misc_feature (1)..(1272): Ceres Seq. ID no. 13622043
  misc_feature (1)..(1272): Ortholog of  Ceres SEQ ID NO 13495070 as cited in SEQ ID NO 53216
  misc_feature (1)..(1272): Ortholog of  Ceres SEQ ID NO 13656228 as cited in SEQ ID NO 65648
  misc_feature (1)..(1272): Ortholog of  Ceres SEQ ID NO 15176717 as cited in SEQ ID NO 0
  misc_feature (1)..(1272): Ortholog of  Ceres SEQ ID NO 15179618 as cited in SEQ ID NO 0

SEQ ID NO: 118537 - protein, 358 aa, Arabidopsis thaliana; identical to SEQ ID NO: 107298
  peptide (1)..(358): Ceres Seq. ID no. 13622044

SEQ ID NO: 118538 - protein, 336 aa, Arabidopsis thaliana; identical to SEQ ID NO: 26651
  peptide (1)..(336): Ceres Seq. ID no. 13622045

SEQ ID NO: 118539 - protein, 293 aa, Arabidopsis thaliana; identical to SEQ ID NO: 26652
  peptide (1)..(293): Ceres Seq. ID no. 13622046

SEQ ID NO: 118540 - DNA, 728 bp, Arabidopsis thaliana; identical to SEQ ID NO: 107301
  misc_feature (1)..(728): Ceres Seq. ID no. 13622136
  misc_feature (1)..(728): Ortholog of  Ceres SEQ ID NO 15179194 as cited in SEQ ID NO 0

SEQ ID NO: 118541 - protein, 181 aa, Arabidopsis thaliana; identical to SEQ ID NO: 86291
  peptide (1)..(181): Ceres Seq. ID no. 13622137

SEQ ID NO: 118542 - protein, 177 aa, Arabidopsis thaliana; identical to SEQ ID NO: 86292
  peptide (1)..(177): Ceres Seq. ID no. 13622138

SEQ ID NO: 118543 - protein, 162 aa, Arabidopsis thaliana; identical to SEQ ID NO: 47248
  peptide (1)..(162): Ceres Seq. ID no. 13622139

SEQ ID NO: 118544 - DNA, 1234 bp, Arabidopsis thaliana; identical to SEQ ID NO: 107305
  misc_feature (1)..(1234): Ceres Seq. ID no. 13622144
  misc_feature (1)..(1234): Ortholog of  Ceres SEQ ID NO 13593831 as cited in SEQ ID NO 53828

SEQ ID NO: 118545 - protein, 286 aa, Arabidopsis thaliana; identical to SEQ ID NO: 97671
  peptide (1)..(286): Ceres Seq. ID no. 13622145

SEQ ID NO: 118546 - protein, 214 aa, Arabidopsis thaliana; identical to SEQ ID NO: 27567
  peptide (1)..(214): Ceres Seq. ID no. 13622146

SEQ ID NO: 118547 - protein, 206 aa, Arabidopsis thaliana; identical to SEQ ID NO: 27568
  peptide (1)..(206): Ceres Seq. ID no. 13622147

SEQ ID NO: 118548 - DNA, 1033 bp, Arabidopsis thaliana; identical to SEQ ID NO: 107309
  misc_feature (1)..(1033): Ceres Seq. ID no. 13645690
  misc_feature (1)..(1033): Ortholog of  Ceres SEQ ID NO 13599581 as cited in SEQ ID NO 0

SEQ ID NO: 118549 - protein, 187 aa, Arabidopsis thaliana; identical to SEQ ID NO: 107310
  peptide (1)..(187): Ceres Seq. ID no. 13645691

SEQ ID NO: 118550 - protein, 161 aa, Arabidopsis thaliana; identical to SEQ ID NO: 107311
  peptide (1)..(161): Ceres Seq. ID no. 13645692

SEQ ID NO: 118551 - protein, 95 aa, Arabidopsis thaliana; identical to SEQ ID NO: 107312
  peptide (1)..(95): Ceres Seq. ID no. 13645693

SEQ ID NO: 118552 - DNA, 1578 bp, Arabidopsis thaliana; identical to SEQ ID NO: 107313
  misc_feature (1)..(1578): Ceres Seq. ID no. 13645782
  misc_feature (1)..(1578): Ortholog of  Ceres SEQ ID NO 14312212 as cited in SEQ ID NO 54399
  misc_feature (1)..(1578): Ortholog of  Ceres SEQ ID NO 15225341 as cited in SEQ ID NO 55222
  misc_feature (1)..(1578): Ortholog of  Ceres SEQ ID NO 13653980 as cited in SEQ ID NO 69253

SEQ ID NO: 118553 - protein, 410 aa, Arabidopsis thaliana; identical to SEQ ID NO: 106343
  peptide (1)..(410): Ceres Seq. ID no. 13645783

SEQ ID NO: 118554 - protein, 297 aa, Arabidopsis thaliana; identical to SEQ ID NO: 23306
  peptide (1)..(297): Ceres Seq. ID no. 13645784

SEQ ID NO: 118555 - DNA, 1152 bp, Arabidopsis thaliana; identical to SEQ ID NO: 107316
  misc_feature (1)..(1152): Ceres Seq. ID no. 13645999
  misc_feature (1)..(1152): Ortholog of  Ceres SEQ ID NO 14305750 as cited in SEQ ID NO 52458
  misc_feature (1)..(1152): Ortholog of  Ceres SEQ ID NO 12608276 as cited in SEQ ID NO 57871
  misc_feature (1)..(1152): Ortholog of  Ceres SEQ ID NO 13598492 as cited in SEQ ID NO 63882
  misc_feature (1)..(1152): Ortholog of  Ceres SEQ ID NO 13657914 as cited in SEQ ID NO 66230
  misc_feature (1)..(1152): Ortholog of  Ceres SEQ ID NO 13595877 as cited in SEQ ID NO 67702

SEQ ID NO: 118556 - protein, 326 aa, Arabidopsis thaliana; identical to SEQ ID NO: 107317
  peptide (1)..(326): Ceres Seq. ID no. 13646000

SEQ ID NO: 118557 - protein, 312 aa, Arabidopsis thaliana; identical to SEQ ID NO: 107318
  peptide (1)..(312): Ceres Seq. ID no. 13646001

SEQ ID NO: 118558 - protein, 301 aa, Arabidopsis thaliana; identical to SEQ ID NO: 107319
  peptide (1)..(301): Ceres Seq. ID no. 13646002

SEQ ID NO: 118559 - DNA, 1411 bp, Arabidopsis thaliana; identical to SEQ ID NO: 107320
  misc_feature (1)..(1411): Ceres Seq. ID no. 13646259
  misc_feature (1)..(1411): Ortholog of  Ceres SEQ ID NO 13654409 as cited in SEQ ID NO 68534

SEQ ID NO: 118560 - protein, 445 aa, Arabidopsis thaliana; identical to SEQ ID NO: 44495
  peptide (1)..(445): Ceres Seq. ID no. 13646260

SEQ ID NO: 118561 - protein, 413 aa, Arabidopsis thaliana; identical to SEQ ID NO: 44496
  peptide (1)..(413): Ceres Seq. ID no. 13646261

SEQ ID NO: 118562 - protein, 371 aa, Arabidopsis thaliana; identical to SEQ ID NO: 44497
  peptide (1)..(371): Ceres Seq. ID no. 13646262

SEQ ID NO: 118563 - DNA, 3020 bp, Arabidopsis thaliana; identical to SEQ ID NO: 107324
  misc_feature (1)..(3020): Ceres Seq. ID no. 13646381
  misc_feature (1)..(3020): Ortholog of  Ceres SEQ ID NO 14306148 as cited in SEQ ID NO 1370

SEQ ID NO: 118564 - protein, 1005 aa, Arabidopsis thaliana; identical to SEQ ID NO: 107325
  peptide (1)..(1005): Ceres Seq. ID no. 13646382

SEQ ID NO: 118565 - protein, 993 aa, Arabidopsis thaliana; identical to SEQ ID NO: 107326
  peptide (1)..(993): Ceres Seq. ID no. 13646383

SEQ ID NO: 118566 - protein, 961 aa, Arabidopsis thaliana; identical to SEQ ID NO: 107327
  peptide (1)..(961): Ceres Seq. ID no. 13646384

SEQ ID NO: 118567 - DNA, 2568 bp, Arabidopsis thaliana; identical to SEQ ID NO: 107328
  misc_feature (1)..(2568): Ceres Seq. ID no. 13646430
  misc_feature (1)..(2568): Ortholog of  Ceres SEQ ID NO 14309755 as cited in SEQ ID NO 20741

SEQ ID NO: 118568 - protein, 693 aa, Arabidopsis thaliana; identical to SEQ ID NO: 107329
  peptide (1)..(693): Ceres Seq. ID no. 15218749

SEQ ID NO: 118569 - protein, 660 aa, Arabidopsis thaliana; identical to SEQ ID NO: 107330
  peptide (1)..(660): Ceres Seq. ID no. 15218750

SEQ ID NO: 118570 - protein, 574 aa, Arabidopsis thaliana; identical to SEQ ID NO: 107331
  peptide (1)..(574): Ceres Seq. ID no. 15218751

SEQ ID NO: 118571 - DNA, 2390 bp, Arabidopsis thaliana; identical to SEQ ID NO: 107332
  misc_feature (1)..(2390): Ceres Seq. ID no. 13646599
  misc_feature (1)..(2390): Ortholog of  Ceres SEQ ID NO 13654989 as cited in SEQ ID NO 63117
  misc_feature (1)..(2390): Ortholog of  Ceres SEQ ID NO 13584744 as cited in SEQ ID NO 69137

SEQ ID NO: 118572 - protein, 740 aa, Arabidopsis thaliana; identical to SEQ ID NO: 107333
  peptide (1)..(740): Ceres Seq. ID no. 13646600

SEQ ID NO: 118573 - protein, 669 aa, Arabidopsis thaliana; identical to SEQ ID NO: 107334
  peptide (1)..(669): Ceres Seq. ID no. 13646601

SEQ ID NO: 118574 - protein, 610 aa, Arabidopsis thaliana; identical to SEQ ID NO: 107335
  peptide (1)..(610): Ceres Seq. ID no. 13646602

SEQ ID NO: 118575 - DNA, 2278 bp, Arabidopsis thaliana; identical to SEQ ID NO: 107336
  misc_feature (1)..(2278): Ceres Seq. ID no. 13646608
  misc_feature (1)..(2278): Ortholog of  Ceres SEQ ID NO 12460981 as cited in SEQ ID NO 65146

SEQ ID NO: 118576 - protein, 723 aa, Arabidopsis thaliana; identical to SEQ ID NO: 107337
  peptide (1)..(723): Ceres Seq. ID no. 13646609

SEQ ID NO: 118577 - protein, 704 aa, Arabidopsis thaliana; identical to SEQ ID NO: 107338
  peptide (1)..(704): Ceres Seq. ID no. 13646610

SEQ ID NO: 118578 - protein, 674 aa, Arabidopsis thaliana; identical to SEQ ID NO: 107339
  peptide (1)..(674): Ceres Seq. ID no. 13646611

SEQ ID NO: 118579 - DNA, 1698 bp, Arabidopsis thaliana; identical to SEQ ID NO: 107340
  misc_feature (1)..(1698): Ceres Seq. ID no. 13646617
  misc_feature (1)..(1698): Ortholog of  Ceres SEQ ID NO 15171446 as cited in SEQ ID NO 51590

SEQ ID NO: 118580 - protein, 565 aa, Arabidopsis thaliana; identical to SEQ ID NO: 107341
  peptide (1)..(565): Ceres Seq. ID no. 13646618

SEQ ID NO: 118581 - protein, 525 aa, Arabidopsis thaliana; identical to SEQ ID NO: 107342
  peptide (1)..(525): Ceres Seq. ID no. 13646619

SEQ ID NO: 118582 - protein, 446 aa, Arabidopsis thaliana; identical to SEQ ID NO: 107343
  peptide (1)..(446): Ceres Seq. ID no. 13646620

SEQ ID NO: 118583 - DNA, 2122 bp, Arabidopsis thaliana; identical to SEQ ID NO: 107344
  misc_feature (1)..(2122): Ceres Seq. ID no. 13646734
  misc_feature (1)..(2122): Ortholog of  Ceres SEQ ID NO 14307896 as cited in SEQ ID NO 66915
  misc_feature (1)..(2122): Ortholog of  Ceres SEQ ID NO 13657008 as cited in SEQ ID NO 69164

SEQ ID NO: 118584 - protein, 658 aa, Arabidopsis thaliana; identical to SEQ ID NO: 107345
  peptide (1)..(658): Ceres Seq. ID no. 13646735

SEQ ID NO: 118585 - protein, 594 aa, Arabidopsis thaliana; identical to SEQ ID NO: 107346
  peptide (1)..(594): Ceres Seq. ID no. 13646736

SEQ ID NO: 118586 - protein, 556 aa, Arabidopsis thaliana; identical to SEQ ID NO: 45700
  peptide (1)..(556): Ceres Seq. ID no. 13646737

SEQ ID NO: 118587 - DNA, 1467 bp, Arabidopsis thaliana; identical to SEQ ID NO: 107348
  misc_feature (1)..(1467): Ceres Seq. ID no. 13646772
  misc_feature (1)..(1467): Ortholog of  Ceres SEQ ID NO 15226515 as cited in SEQ ID NO 58519

SEQ ID NO: 118588 - protein, 364 aa, Arabidopsis thaliana; identical to SEQ ID NO: 45785
  peptide (1)..(364): Ceres Seq. ID no. 13646773

SEQ ID NO: 118589 - protein, 305 aa, Arabidopsis thaliana; identical to SEQ ID NO: 45786
  peptide (1)..(305): Ceres Seq. ID no. 13646774

SEQ ID NO: 118590 - protein, 296 aa, Arabidopsis thaliana; identical to SEQ ID NO: 45787
  peptide (1)..(296): Ceres Seq. ID no. 13646775

SEQ ID NO: 118591 - DNA, 3006 bp, Arabidopsis thaliana; identical to SEQ ID NO: 107352
  misc_feature (1)..(3006): Ceres Seq. ID no. 13646785
  misc_feature (1)..(3006): Ortholog of  Ceres SEQ ID NO 15168977 as cited in SEQ ID NO 20587

SEQ ID NO: 118592 - protein, 700 aa, Arabidopsis thaliana; identical to SEQ ID NO: 107353
  peptide (1)..(700): Ceres Seq. ID no. 13646786

SEQ ID NO: 118593 - protein, 678 aa, Arabidopsis thaliana; identical to SEQ ID NO: 107354
  peptide (1)..(678): Ceres Seq. ID no. 13646787

SEQ ID NO: 118594 - protein, 670 aa, Arabidopsis thaliana; identical to SEQ ID NO: 107355
  peptide (1)..(670): Ceres Seq. ID no. 13646788

SEQ ID NO: 118595 - DNA, 2458 bp, Arabidopsis thaliana; identical to SEQ ID NO: 107356
  misc_feature (1)..(2458): Ceres Seq. ID no. 13646820
  misc_feature (1)..(2458): Ortholog of  Ceres SEQ ID NO 13598023 as cited in SEQ ID NO 66487

SEQ ID NO: 118596 - protein, 711 aa, Arabidopsis thaliana; identical to SEQ ID NO: 45709
  peptide (1)..(711): Ceres Seq. ID no. 13646821

SEQ ID NO: 118597 - protein, 569 aa, Arabidopsis thaliana; identical to SEQ ID NO: 45710
  peptide (1)..(569): Ceres Seq. ID no. 13646822

SEQ ID NO: 118598 - protein, 378 aa, Arabidopsis thaliana; identical to SEQ ID NO: 45711
  peptide (1)..(378): Ceres Seq. ID no. 13646823

SEQ ID NO: 118599 - DNA, 2335 bp, Arabidopsis thaliana; identical to SEQ ID NO: 107360
  misc_feature (1)..(2335): Ceres Seq. ID no. 13646852
  misc_feature (1)..(2335): Ortholog of  Ceres SEQ ID NO 14309779 as cited in SEQ ID NO 229

SEQ ID NO: 118600 - protein, 568 aa, Arabidopsis thaliana; identical to SEQ ID NO: 107361
  peptide (1)..(568): Ceres Seq. ID no. 13646853

SEQ ID NO: 118601 - protein, 365 aa, Arabidopsis thaliana; identical to SEQ ID NO: 107362
  peptide (1)..(365): Ceres Seq. ID no. 13646854

SEQ ID NO: 118602 - protein, 361 aa, Arabidopsis thaliana; identical to SEQ ID NO: 107363
  peptide (1)..(361): Ceres Seq. ID no. 13646855

SEQ ID NO: 118603 - DNA, 1562 bp, Arabidopsis thaliana; identical to SEQ ID NO: 107364
  misc_feature (1)..(1562): Ceres Seq. ID no. 13646902
  misc_feature (1)..(1562): Ortholog of  Ceres SEQ ID NO 13596090 as cited in SEQ ID NO 68377

SEQ ID NO: 118604 - protein, 422 aa, Arabidopsis thaliana; identical to SEQ ID NO: 46862
  peptide (1)..(422): Ceres Seq. ID no. 13646903

SEQ ID NO: 118605 - protein, 419 aa, Arabidopsis thaliana; identical to SEQ ID NO: 46863
  peptide (1)..(419): Ceres Seq. ID no. 13646904

SEQ ID NO: 118606 - protein, 314 aa, Arabidopsis thaliana; identical to SEQ ID NO: 46864
  peptide (1)..(314): Ceres Seq. ID no. 13646905

SEQ ID NO: 118607 - DNA, 1942 bp, Arabidopsis thaliana; identical to SEQ ID NO: 107368
  misc_feature (1)..(1942): Ceres Seq. ID no. 13646960
  misc_feature (1)..(1942): Ortholog of  Ceres SEQ ID NO 14314220 as cited in SEQ ID NO 57321

SEQ ID NO: 118608 - protein, 471 aa, Arabidopsis thaliana; identical to SEQ ID NO: 107369
  peptide (1)..(471): Ceres Seq. ID no. 13646961

SEQ ID NO: 118609 - protein, 329 aa, Arabidopsis thaliana; identical to SEQ ID NO: 107370
  peptide (1)..(329): Ceres Seq. ID no. 13646962

SEQ ID NO: 118610 - DNA, 1533 bp, Arabidopsis thaliana; identical to SEQ ID NO: 107371
  misc_feature (1)..(1533): Ceres Seq. ID no. 13646978
  misc_feature (1)..(1533): Ortholog of  Ceres SEQ ID NO 13585382 as cited in SEQ ID NO 63889

SEQ ID NO: 118611 - protein, 478 aa, Arabidopsis thaliana; identical to SEQ ID NO: 107372
  peptide (1)..(478): Ceres Seq. ID no. 13646979

SEQ ID NO: 118612 - protein, 471 aa, Arabidopsis thaliana; identical to SEQ ID NO: 107373
  peptide (1)..(471): Ceres Seq. ID no. 13646980

SEQ ID NO: 118613 - protein, 347 aa, Arabidopsis thaliana; identical to SEQ ID NO: 46900
  peptide (1)..(347): Ceres Seq. ID no. 13646981

SEQ ID NO: 118614 - DNA, 1318 bp, Arabidopsis thaliana; identical to SEQ ID NO: 107375
  misc_feature (1)..(1318): Ceres Seq. ID no. 13646999
  misc_feature (1)..(1318): Ortholog of  Ceres SEQ ID NO 15178027 as cited in SEQ ID NO 55634
  misc_feature (1)..(1318): Ortholog of  Ceres SEQ ID NO 13597537 as cited in SEQ ID NO 64962

SEQ ID NO: 118615 - protein, 333 aa, Arabidopsis thaliana; identical to SEQ ID NO: 107376
  peptide (1)..(333): Ceres Seq. ID no. 13647000

SEQ ID NO: 118616 - protein, 327 aa, Arabidopsis thaliana; identical to SEQ ID NO: 107377
  peptide (1)..(327): Ceres Seq. ID no. 13647001

SEQ ID NO: 118617 - protein, 325 aa, Arabidopsis thaliana; identical to SEQ ID NO: 107378
  peptide (1)..(325): Ceres Seq. ID no. 13647002

SEQ ID NO: 118618 - DNA, 1667 bp, Arabidopsis thaliana; identical to SEQ ID NO: 107379
  misc_feature (1)..(1667): Ceres Seq. ID no. 13647244
  misc_feature (1)..(1667): Ortholog of  Ceres SEQ ID NO 13596921 as cited in SEQ ID NO 62368

SEQ ID NO: 118619 - protein, 466 aa, Arabidopsis thaliana; identical to SEQ ID NO: 107380
  peptide (1)..(466): Ceres Seq. ID no. 15218829

SEQ ID NO: 118620 - protein, 436 aa, Arabidopsis thaliana; identical to SEQ ID NO: 107381
  peptide (1)..(436): Ceres Seq. ID no. 15218830

SEQ ID NO: 118621 - protein, 329 aa, Arabidopsis thaliana; identical to SEQ ID NO: 107382
  peptide (1)..(329): Ceres Seq. ID no. 15218831

SEQ ID NO: 118622 - DNA, 1285 bp, Arabidopsis thaliana; identical to SEQ ID NO: 107383
  misc_feature (1)..(1285): Ceres Seq. ID no. 13647652
  misc_feature (1)..(1285): Ortholog of  Ceres SEQ ID NO 14309794 as cited in SEQ ID NO 20350

SEQ ID NO: 118623 - protein, 389 aa, Arabidopsis thaliana; identical to SEQ ID NO: 107384
  peptide (1)..(389): Ceres Seq. ID no. 13647653

SEQ ID NO: 118624 - protein, 385 aa, Arabidopsis thaliana; identical to SEQ ID NO: 107385
  peptide (1)..(385): Ceres Seq. ID no. 13647654

SEQ ID NO: 118625 - protein, 361 aa, Arabidopsis thaliana; identical to SEQ ID NO: 107386
  peptide (1)..(361): Ceres Seq. ID no. 13647655

SEQ ID NO: 118626 - DNA, 960 bp, Arabidopsis thaliana; identical to SEQ ID NO: 107387
  misc_feature (1)..(960): Ceres Seq. ID no. 13647665
  misc_feature (1)..(960): Ortholog of  Ceres SEQ ID NO 13595844 as cited in SEQ ID NO 51300
  misc_feature (1)..(960): Ortholog of  Ceres SEQ ID NO 13596593 as cited in SEQ ID NO 62448
  misc_feature (1)..(960): Ortholog of  Ceres SEQ ID NO 13586031 as cited in SEQ ID NO 0

SEQ ID NO: 118627 - protein, 244 aa, Arabidopsis thaliana; identical to SEQ ID NO: 86832
  peptide (1)..(244): Ceres Seq. ID no. 13647666

SEQ ID NO: 118628 - protein, 198 aa, Arabidopsis thaliana; identical to SEQ ID NO: 49606
  peptide (1)..(198): Ceres Seq. ID no. 13647667

SEQ ID NO: 118629 - DNA, 1128 bp, Arabidopsis thaliana; identical to SEQ ID NO: 107390
  misc_feature (1)..(1128): Ceres Seq. ID no. 13647815
  misc_feature (1)..(1128): Ortholog of  Ceres SEQ ID NO 14307589 as cited in SEQ ID NO 20466
  misc_feature (1)..(1128): Ortholog of  Ceres SEQ ID NO 13584238 as cited in SEQ ID NO 64216

SEQ ID NO: 118630 - protein, 130 aa, Arabidopsis thaliana; identical to SEQ ID NO: 107391
  peptide (1)..(130): Ceres Seq. ID no. 15219493

SEQ ID NO: 118631 - protein, 119 aa, Arabidopsis thaliana; identical to SEQ ID NO: 107392
  peptide (1)..(119): Ceres Seq. ID no. 15219494

SEQ ID NO: 118632 - protein, 105 aa, Arabidopsis thaliana; identical to SEQ ID NO: 107393
  peptide (1)..(105): Ceres Seq. ID no. 15219495

SEQ ID NO: 118633 - DNA, 1447 bp, Arabidopsis thaliana; identical to SEQ ID NO: 107394
  misc_feature (1)..(1447): Ceres Seq. ID no. 13647835
  misc_feature (1)..(1447): Ortholog of  Ceres SEQ ID NO 13596465 as cited in SEQ ID NO 62133

SEQ ID NO: 118634 - protein, 405 aa, Arabidopsis thaliana; identical to SEQ ID NO: 107395
  peptide (1)..(405): Ceres Seq. ID no. 13647836

SEQ ID NO: 118635 - protein, 391 aa, Arabidopsis thaliana; identical to SEQ ID NO: 107396
  peptide (1)..(391): Ceres Seq. ID no. 13647837

SEQ ID NO: 118636 - protein, 377 aa, Arabidopsis thaliana; identical to SEQ ID NO: 107397
  peptide (1)..(377): Ceres Seq. ID no. 13647838

SEQ ID NO: 118637 - DNA, 1274 bp, Arabidopsis thaliana; identical to SEQ ID NO: 107398
  misc_feature (1)..(1274): Ceres Seq. ID no. 13647883
  misc_feature (1)..(1274): Ortholog of  Ceres SEQ ID NO 14315915 as cited in SEQ ID NO 57583

SEQ ID NO: 118638 - protein, 314 aa, Arabidopsis thaliana; identical to SEQ ID NO: 107399
  peptide (1)..(314): Ceres Seq. ID no. 15220522

SEQ ID NO: 118639 - protein, 280 aa, Arabidopsis thaliana; identical to SEQ ID NO: 49984
  peptide (1)..(280): Ceres Seq. ID no. 15220523

SEQ ID NO: 118640 - protein, 218 aa, Arabidopsis thaliana; identical to SEQ ID NO: 49985
  peptide (1)..(218): Ceres Seq. ID no. 15220524

SEQ ID NO: 118641 - DNA, 1227 bp, Arabidopsis thaliana; identical to SEQ ID NO: 107402
  misc_feature (1)..(1227): Ceres Seq. ID no. 13647890
  misc_feature (1)..(1227): Ortholog of  Ceres SEQ ID NO 13623732 as cited in SEQ ID NO 0

SEQ ID NO: 118642 - protein, 345 aa, Arabidopsis thaliana; identical to SEQ ID NO: 50605
  peptide (1)..(345): Ceres Seq. ID no. 13647891

SEQ ID NO: 118643 - protein, 319 aa, Arabidopsis thaliana; identical to SEQ ID NO: 50606
  peptide (1)..(319): Ceres Seq. ID no. 13647892

SEQ ID NO: 118644 - protein, 284 aa, Arabidopsis thaliana; identical to SEQ ID NO: 50607
  peptide (1)..(284): Ceres Seq. ID no. 13647893

SEQ ID NO: 118645 - DNA, 1321 bp, Arabidopsis thaliana; identical to SEQ ID NO: 107406
  misc_feature (1)..(1321): Ceres Seq. ID no. 13647913
  misc_feature (1)..(1321): Ortholog of  Ceres SEQ ID NO 15168500 as cited in SEQ ID NO 57041

SEQ ID NO: 118646 - protein, 324 aa, Arabidopsis thaliana; identical to SEQ ID NO: 50633
  peptide (1)..(324): Ceres Seq. ID no. 13647914

SEQ ID NO: 118647 - protein, 323 aa, Arabidopsis thaliana; identical to SEQ ID NO: 50634
  peptide (1)..(323): Ceres Seq. ID no. 13647915

SEQ ID NO: 118648 - protein, 288 aa, Arabidopsis thaliana; identical to SEQ ID NO: 50635
  peptide (1)..(288): Ceres Seq. ID no. 13647916

SEQ ID NO: 118649 - DNA, 1756 bp, Arabidopsis thaliana; identical to SEQ ID NO: 107410
  misc_feature (1)..(1756): Ceres Seq. ID no. 13647953
  misc_feature (1)..(1756): Ortholog of  Ceres SEQ ID NO 15171438 as cited in SEQ ID NO 51665
  misc_feature (1)..(1756): Ortholog of  Ceres SEQ ID NO 15170804 as cited in SEQ ID NO 52653
  misc_feature (1)..(1756): Ortholog of  Ceres SEQ ID NO 15170203 as cited in SEQ ID NO 53291
  misc_feature (1)..(1756): Ortholog of  Ceres SEQ ID NO 14303083 as cited in SEQ ID NO 66573

SEQ ID NO: 118650 - protein, 465 aa, Arabidopsis thaliana; identical to SEQ ID NO: 50216
  peptide (1)..(465): Ceres Seq. ID no. 13647954

SEQ ID NO: 118651 - protein, 450 aa, Arabidopsis thaliana; identical to SEQ ID NO: 50217
  peptide (1)..(450): Ceres Seq. ID no. 13647955

SEQ ID NO: 118652 - protein, 449 aa, Arabidopsis thaliana; identical to SEQ ID NO: 50218
  peptide (1)..(449): Ceres Seq. ID no. 13647956

SEQ ID NO: 118653 - DNA, 1696 bp, Arabidopsis thaliana; identical to SEQ ID NO: 107414
  misc_feature (1)..(1696): Ceres Seq. ID no. 13647998
  misc_feature (1)..(1696): Ortholog of  Ceres SEQ ID NO 13596021 as cited in SEQ ID NO 62020

SEQ ID NO: 118654 - protein, 426 aa, Arabidopsis thaliana; identical to SEQ ID NO: 107415
  peptide (1)..(426): Ceres Seq. ID no. 15219517

SEQ ID NO: 118655 - protein, 401 aa, Arabidopsis thaliana; identical to SEQ ID NO: 107416
  peptide (1)..(401): Ceres Seq. ID no. 15219518

SEQ ID NO: 118656 - protein, 394 aa, Arabidopsis thaliana; identical to SEQ ID NO: 107417
  peptide (1)..(394): Ceres Seq. ID no. 15219519

SEQ ID NO: 118657 - DNA, 785 bp, Arabidopsis thaliana; identical to SEQ ID NO: 107418
  misc_feature (1)..(785): Ceres Seq. ID no. 13648289
  misc_feature (1)..(785): Ortholog of  Ceres SEQ ID NO 13581971 as cited in SEQ ID NO 56006
  misc_feature (1)..(785): Ortholog of  Ceres SEQ ID NO 15175208 as cited in SEQ ID NO 57966

SEQ ID NO: 118658 - protein, 192 aa, Arabidopsis thaliana; identical to SEQ ID NO: 47589
  peptide (1)..(192): Ceres Seq. ID no. 13648290

SEQ ID NO: 118659 - protein, 168 aa, Arabidopsis thaliana; identical to SEQ ID NO: 47590
  peptide (1)..(168): Ceres Seq. ID no. 13648291

SEQ ID NO: 118660 - DNA, 760 bp, Arabidopsis thaliana; identical to SEQ ID NO: 107421
  misc_feature (1)..(760): Ceres Seq. ID no. 13648299
  misc_feature (1)..(760): Ortholog of  Ceres SEQ ID NO 15179952 as cited in SEQ ID NO 1063

SEQ ID NO: 118661 - protein, 164 aa, Arabidopsis thaliana; identical to SEQ ID NO: 49656
  peptide (1)..(164): Ceres Seq. ID no. 13648300

SEQ ID NO: 118662 - DNA, 1411 bp, Arabidopsis thaliana; identical to SEQ ID NO: 107423
  misc_feature (1)..(1411): Ceres Seq. ID no. 13648309
  misc_feature (1)..(1411): Ortholog of  Ceres SEQ ID NO 14305026 as cited in SEQ ID NO 52980
  misc_feature (1)..(1411): Ortholog of  Ceres SEQ ID NO 15175670 as cited in SEQ ID NO 55204
  misc_feature (1)..(1411): Ortholog of  Ceres SEQ ID NO 13655712 as cited in SEQ ID NO 63394

SEQ ID NO: 118663 - protein, 311 aa, Arabidopsis thaliana; identical to SEQ ID NO: 107424
  peptide (1)..(311): Ceres Seq. ID no. 15219541
  misc_feature (137)..(137): Xaa is any aa, unknown or other

SEQ ID NO: 118664 - protein, 310 aa, Arabidopsis thaliana; identical to SEQ ID NO: 107425
  peptide (1)..(310): Ceres Seq. ID no. 15219542
  misc_feature (136)..(136): Xaa is any aa, unknown or other

SEQ ID NO: 118665 - protein, 273 aa, Arabidopsis thaliana; identical to SEQ ID NO: 107426
  peptide (1)..(273): Ceres Seq. ID no. 15219543
  misc_feature (99)..(99): Xaa is any aa, unknown or other

SEQ ID NO: 118666 - DNA, 1404 bp, Arabidopsis thaliana; identical to SEQ ID NO: 107427
  misc_feature (1)..(1404): Ceres Seq. ID no. 13648336
  misc_feature (1)..(1404): Ortholog of  Ceres SEQ ID NO 14310350 as cited in SEQ ID NO 20670
  misc_feature (1)..(1404): Ortholog of  Ceres SEQ ID NO 15177648 as cited in SEQ ID NO 58917

SEQ ID NO: 118667 - protein, 262 aa, Arabidopsis thaliana; identical to SEQ ID NO: 107428
  peptide (1)..(262): Ceres Seq. ID no. 13648337

SEQ ID NO: 118668 - protein, 223 aa, Arabidopsis thaliana; identical to SEQ ID NO: 107429
  peptide (1)..(223): Ceres Seq. ID no. 13648338

SEQ ID NO: 118669 - DNA, 485 bp, Arabidopsis thaliana; identical to SEQ ID NO: 107430
  misc_feature (1)..(485): Ceres Seq. ID no. 13650139
  misc_feature (1)..(485): Ortholog of  Ceres SEQ ID NO 15176349 as cited in SEQ ID NO 58789

SEQ ID NO: 118670 - protein, 83 aa, Arabidopsis thaliana; identical to SEQ ID NO: 107431
  peptide (1)..(83): Ceres Seq. ID no. 13650140

SEQ ID NO: 118671 - protein, 65 aa, Arabidopsis thaliana; identical to SEQ ID NO: 107432
  peptide (1)..(65): Ceres Seq. ID no. 13650141

SEQ ID NO: 118672 - protein, 53 aa, Arabidopsis thaliana; identical to SEQ ID NO: 107433
  peptide (1)..(53): Ceres Seq. ID no. 13650142
  misc_feature (33)..(33): Xaa is any aa, unknown or other
  misc_feature (34)..(34): Xaa is any aa, unknown or other
  misc_feature (36)..(36): Xaa is any aa, unknown or other
  misc_feature (37)..(37): Xaa is any aa, unknown or other

SEQ ID NO: 118673 - DNA, 772 bp, Arabidopsis thaliana; identical to SEQ ID NO: 107434
  misc_feature (1)..(772): Ceres Seq. ID no. 13650164
  misc_feature (1)..(772): Ortholog of  Ceres SEQ ID NO 15179194 as cited in SEQ ID NO 0

SEQ ID NO: 118674 - protein, 195 aa, Arabidopsis thaliana; identical to SEQ ID NO: 107435
  peptide (1)..(195): Ceres Seq. ID no. 13650165

SEQ ID NO: 118675 - protein, 181 aa, Arabidopsis thaliana; identical to SEQ ID NO: 36039
  peptide (1)..(181): Ceres Seq. ID no. 13650166

SEQ ID NO: 118676 - protein, 177 aa, Arabidopsis thaliana; identical to SEQ ID NO: 36040
  peptide (1)..(177): Ceres Seq. ID no. 13650167

SEQ ID NO: 118677 - DNA, 2142 bp, Arabidopsis thaliana; identical to SEQ ID NO: 107438
  misc_feature (1)..(2142): Ceres Seq. ID no. 13650190
  misc_feature (1)..(2142): Ortholog of  Ceres SEQ ID NO 12460981 as cited in SEQ ID NO 65146

SEQ ID NO: 118678 - protein, 668 aa, Arabidopsis thaliana; identical to SEQ ID NO: 107439
  peptide (1)..(668): Ceres Seq. ID no. 15220544

SEQ ID NO: 118679 - protein, 649 aa, Arabidopsis thaliana; identical to SEQ ID NO: 107440
  peptide (1)..(649): Ceres Seq. ID no. 15220545

SEQ ID NO: 118680 - protein, 619 aa, Arabidopsis thaliana; identical to SEQ ID NO: 107441
  peptide (1)..(619): Ceres Seq. ID no. 15220546

SEQ ID NO: 118681 - DNA, 1711 bp, Arabidopsis thaliana; identical to SEQ ID NO: 107442
  misc_feature (1)..(1711): Ceres Seq. ID no. 13650221
  misc_feature (1)..(1711): Ortholog of  Ceres SEQ ID NO 13656177 as cited in SEQ ID NO 64997

SEQ ID NO: 118682 - protein, 477 aa, Arabidopsis thaliana; identical to SEQ ID NO: 107443
  peptide (1)..(477): Ceres Seq. ID no. 13650222

SEQ ID NO: 118683 - protein, 427 aa, Arabidopsis thaliana; identical to SEQ ID NO: 20810
  peptide (1)..(427): Ceres Seq. ID no. 13650223

SEQ ID NO: 118684 - protein, 344 aa, Arabidopsis thaliana; identical to SEQ ID NO: 20811
  peptide (1)..(344): Ceres Seq. ID no. 13650224

SEQ ID NO: 118685 - DNA, 1371 bp, Arabidopsis thaliana; identical to SEQ ID NO: 107446
  misc_feature (1)..(1371): Ceres Seq. ID no. 13650244
  misc_feature (1)..(1371): Ortholog of  Ceres SEQ ID NO 14309794 as cited in SEQ ID NO 20350

SEQ ID NO: 118686 - protein, 397 aa, Arabidopsis thaliana; identical to SEQ ID NO: 20351
  peptide (1)..(397): Ceres Seq. ID no. 13650245

SEQ ID NO: 118687 - protein, 393 aa, Arabidopsis thaliana; identical to SEQ ID NO: 20352
  peptide (1)..(393): Ceres Seq. ID no. 13650246

SEQ ID NO: 118688 - protein, 369 aa, Arabidopsis thaliana; identical to SEQ ID NO: 20353
  peptide (1)..(369): Ceres Seq. ID no. 13650247

SEQ ID NO: 118689 - DNA, 1527 bp, Arabidopsis thaliana; identical to SEQ ID NO: 107450
  misc_feature (1)..(1527): Ceres Seq. ID no. 13650280
  misc_feature (1)..(1527): Ortholog of  Ceres SEQ ID NO 13596807 as cited in SEQ ID NO 62275

SEQ ID NO: 118690 - protein, 338 aa, Arabidopsis thaliana; identical to SEQ ID NO: 107451
  peptide (1)..(338): Ceres Seq. ID no. 13650281

SEQ ID NO: 118691 - protein, 327 aa, Arabidopsis thaliana; identical to SEQ ID NO: 107452
  peptide (1)..(327): Ceres Seq. ID no. 13650282

SEQ ID NO: 118692 - protein, 274 aa, Arabidopsis thaliana; identical to SEQ ID NO: 107453
  peptide (1)..(274): Ceres Seq. ID no. 13650283

SEQ ID NO: 118693 - DNA, 1649 bp, Arabidopsis thaliana; identical to SEQ ID NO: 107454
  misc_feature (1)..(1649): Ceres Seq. ID no. 13650284
  misc_feature (1)..(1649): Ortholog of  Ceres SEQ ID NO 12608463 as cited in SEQ ID NO 60238

SEQ ID NO: 118694 - protein, 337 aa, Arabidopsis thaliana; identical to SEQ ID NO: 107455
  peptide (1)..(337): Ceres Seq. ID no. 13650285
  misc_feature (335)..(335): Xaa is any aa, unknown or other

SEQ ID NO: 118695 - protein, 324 aa, Arabidopsis thaliana; identical to SEQ ID NO: 107456
  peptide (1)..(324): Ceres Seq. ID no. 13650286
  misc_feature (322)..(322): Xaa is any aa, unknown or other

SEQ ID NO: 118696 - protein, 234 aa, Arabidopsis thaliana; identical to SEQ ID NO: 107457
  peptide (1)..(234): Ceres Seq. ID no. 13650287
  misc_feature (232)..(232): Xaa is any aa, unknown or other

SEQ ID NO: 118697 - DNA, 1597 bp, Arabidopsis thaliana; identical to SEQ ID NO: 107458
  misc_feature (1)..(1597): Ceres Seq. ID no. 13650290
  misc_feature (1)..(1597): Ortholog of  Ceres SEQ ID NO 14310024 as cited in SEQ ID NO 20634
  misc_feature (1)..(1597): Ortholog of  Ceres SEQ ID NO 15177184 as cited in SEQ ID NO 58157

SEQ ID NO: 118698 - protein, 521 aa, Arabidopsis thaliana; identical to SEQ ID NO: 107459
  peptide (1)..(521): Ceres Seq. ID no. 13650291

SEQ ID NO: 118699 - protein, 513 aa, Arabidopsis thaliana; identical to SEQ ID NO: 107460
  peptide (1)..(513): Ceres Seq. ID no. 13650292

SEQ ID NO: 118700 - protein, 362 aa, Arabidopsis thaliana; identical to SEQ ID NO: 107461
  peptide (1)..(362): Ceres Seq. ID no. 13650293

SEQ ID NO: 118701 - DNA, 1248 bp, Arabidopsis thaliana; identical to SEQ ID NO: 107462
  misc_feature (1)..(1248): Ceres Seq. ID no. 13650328
  misc_feature (1)..(1248): Ortholog of  Ceres SEQ ID NO 12614972 as cited in SEQ ID NO 61986
  misc_feature (1)..(1248): Ortholog of  Ceres SEQ ID NO 12625706 as cited in SEQ ID NO 64144
  misc_feature (1)..(1248): Ortholog of  Ceres SEQ ID NO 13584933 as cited in SEQ ID NO 65009
  misc_feature (1)..(1248): Ortholog of  Ceres SEQ ID NO 12634984 as cited in SEQ ID NO 0
  misc_feature (1)..(1248): Ortholog of  Ceres SEQ ID NO 13599377 as cited in SEQ ID NO 0

SEQ ID NO: 118702 - protein, 361 aa, Arabidopsis thaliana; identical to SEQ ID NO: 107463
  peptide (1)..(361): Ceres Seq. ID no. 13650329

SEQ ID NO: 118703 - protein, 351 aa, Arabidopsis thaliana; identical to SEQ ID NO: 107464
  peptide (1)..(351): Ceres Seq. ID no. 13650330

SEQ ID NO: 118704 - protein, 199 aa, Arabidopsis thaliana; identical to SEQ ID NO: 107465
  peptide (1)..(199): Ceres Seq. ID no. 13650331

SEQ ID NO: 118705 - DNA, 2224 bp, Arabidopsis thaliana; identical to SEQ ID NO: 107466
  misc_feature (1)..(2224): Ceres Seq. ID no. 13650348
  misc_feature (1)..(2224): Ortholog of  Ceres SEQ ID NO 12611726 as cited in SEQ ID NO 56740
  misc_feature (1)..(2224): Ortholog of  Ceres SEQ ID NO 13660693 as cited in SEQ ID NO 67411

SEQ ID NO: 118706 - protein, 554 aa, Arabidopsis thaliana; identical to SEQ ID NO: 107467
  peptide (1)..(554): Ceres Seq. ID no. 13650349

SEQ ID NO: 118707 - protein, 501 aa, Arabidopsis thaliana; identical to SEQ ID NO: 107468
  peptide (1)..(501): Ceres Seq. ID no. 13650350

SEQ ID NO: 118708 - protein, 500 aa, Arabidopsis thaliana; identical to SEQ ID NO: 107469
  peptide (1)..(500): Ceres Seq. ID no. 13650351

SEQ ID NO: 118709 - DNA, 1258 bp, Arabidopsis thaliana; identical to SEQ ID NO: 107470
  misc_feature (1)..(1258): Ceres Seq. ID no. 13650383
  misc_feature (1)..(1258): Ortholog of  Ceres SEQ ID NO 15176333 as cited in SEQ ID NO 52787
  misc_feature (1)..(1258): Ortholog of  Ceres SEQ ID NO 15170403 as cited in SEQ ID NO 53457
  misc_feature (1)..(1258): Ortholog of  Ceres SEQ ID NO 14303479 as cited in SEQ ID NO 54254
  misc_feature (1)..(1258): Ortholog of  Ceres SEQ ID NO 14312047 as cited in SEQ ID NO 55656
  misc_feature (1)..(1258): Ortholog of  Ceres SEQ ID NO 13660872 as cited in SEQ ID NO 60830
  misc_feature (1)..(1258): Ortholog of  Ceres SEQ ID NO 12616221 as cited in SEQ ID NO 63291
  misc_feature (1)..(1258): Ortholog of  Ceres SEQ ID NO 14302355 as cited in SEQ ID NO 65830

SEQ ID NO: 118710 - protein, 191 aa, Arabidopsis thaliana; identical to SEQ ID NO: 107471
  peptide (1)..(191): Ceres Seq. ID no. 13650384

SEQ ID NO: 118711 - protein, 153 aa, Arabidopsis thaliana; identical to SEQ ID NO: 107472
  peptide (1)..(153): Ceres Seq. ID no. 13650385

SEQ ID NO: 118712 - protein, 126 aa, Arabidopsis thaliana; identical to SEQ ID NO: 107473
  peptide (1)..(126): Ceres Seq. ID no. 13650386

SEQ ID NO: 118713 - DNA, 1694 bp, Arabidopsis thaliana; identical to SEQ ID NO: 107474
  misc_feature (1)..(1694): Ceres Seq. ID no. 13650395
  misc_feature (1)..(1694): Ortholog of  Ceres SEQ ID NO 13646595 as cited in SEQ ID NO 20561
  misc_feature (1)..(1694): Ortholog of  Ceres SEQ ID NO 15171614 as cited in SEQ ID NO 60106
  misc_feature (1)..(1694): Ortholog of  Ceres SEQ ID NO 13597574 as cited in SEQ ID NO 64677
  misc_feature (1)..(1694): Ortholog of  Ceres SEQ ID NO 13597843 as cited in SEQ ID NO 64850
  misc_feature (1)..(1694): Ortholog of  Ceres SEQ ID NO 13597678 as cited in SEQ ID NO 65375
  misc_feature (1)..(1694): Ortholog of  Ceres SEQ ID NO 13596180 as cited in SEQ ID NO 67941
  misc_feature (1)..(1694): Ortholog of  Ceres SEQ ID NO 13591190 as cited in SEQ ID NO 68044
  misc_feature (1)..(1694): Ortholog of  Ceres SEQ ID NO 13595961 as cited in SEQ ID NO 68223

SEQ ID NO: 118714 - protein, 380 aa, Arabidopsis thaliana; identical to SEQ ID NO: 89780
  peptide (1)..(380): Ceres Seq. ID no. 13650396

SEQ ID NO: 118715 - protein, 377 aa, Arabidopsis thaliana; identical to SEQ ID NO: 89781
  peptide (1)..(377): Ceres Seq. ID no. 13650397

SEQ ID NO: 118716 - protein, 366 aa, Arabidopsis thaliana; identical to SEQ ID NO: 107477
  peptide (1)..(366): Ceres Seq. ID no. 13650398

SEQ ID NO: 118717 - DNA, 1421 bp, Arabidopsis thaliana; identical to SEQ ID NO: 107478
  misc_feature (1)..(1421): Ceres Seq. ID no. 13650399
  misc_feature (1)..(1421): Ortholog of  Ceres SEQ ID NO 13580053 as cited in SEQ ID NO 63559

SEQ ID NO: 118718 - protein, 427 aa, Arabidopsis thaliana; identical to SEQ ID NO: 107479
  peptide (1)..(427): Ceres Seq. ID no. 13650400

SEQ ID NO: 118719 - protein, 412 aa, Arabidopsis thaliana; identical to SEQ ID NO: 107480
  peptide (1)..(412): Ceres Seq. ID no. 13650401

SEQ ID NO: 118720 - protein, 407 aa, Arabidopsis thaliana; identical to SEQ ID NO: 107481
  peptide (1)..(407): Ceres Seq. ID no. 13650402

SEQ ID NO: 118721 - DNA, 767 bp, Arabidopsis thaliana; identical to SEQ ID NO: 107482
  misc_feature (1)..(767): Ceres Seq. ID no. 13650411
  misc_feature (1)..(767): Ortholog of  Ceres SEQ ID NO 14302047 as cited in SEQ ID NO 54849
  misc_feature (1)..(767): Ortholog of  Ceres SEQ ID NO 14307427 as cited in SEQ ID NO 59405

SEQ ID NO: 118722 - protein, 189 aa, Arabidopsis thaliana; identical to SEQ ID NO: 82054
  peptide (1)..(189): Ceres Seq. ID no. 13650412

SEQ ID NO: 118723 - protein, 162 aa, Arabidopsis thaliana; identical to SEQ ID NO: 82055
  peptide (1)..(162): Ceres Seq. ID no. 13650413

SEQ ID NO: 118724 - protein, 103 aa, Arabidopsis thaliana; identical to SEQ ID NO: 107485
  peptide (1)..(103): Ceres Seq. ID no. 13650414

SEQ ID NO: 118725 - DNA, 868 bp, Arabidopsis thaliana; identical to SEQ ID NO: 107486
  misc_feature (1)..(868): Ceres Seq. ID no. 13650415
  misc_feature (1)..(868): Ortholog of  Ceres SEQ ID NO 14309248 as cited in SEQ ID NO 0

SEQ ID NO: 118726 - protein, 221 aa, Arabidopsis thaliana; identical to SEQ ID NO: 107487
  peptide (1)..(221): Ceres Seq. ID no. 13650416

SEQ ID NO: 118727 - protein, 146 aa, Arabidopsis thaliana; identical to SEQ ID NO: 107488
  peptide (1)..(146): Ceres Seq. ID no. 13650417

SEQ ID NO: 118728 - DNA, 908 bp, Arabidopsis thaliana; identical to SEQ ID NO: 107489
  misc_feature (1)..(908): Ceres Seq. ID no. 13650422
  misc_feature (1)..(908): Ortholog of  Ceres SEQ ID NO 13595187 as cited in SEQ ID NO 56052
  misc_feature (1)..(908): Ortholog of  Ceres SEQ ID NO 13662053 as cited in SEQ ID NO 61547
  misc_feature (1)..(908): Ortholog of  Ceres SEQ ID NO 13624283 as cited in SEQ ID NO 0

SEQ ID NO: 118729 - protein, 177 aa, Arabidopsis thaliana; identical to SEQ ID NO: 106285
  peptide (1)..(177): Ceres Seq. ID no. 13650423

SEQ ID NO: 118730 - protein, 166 aa, Arabidopsis thaliana; identical to SEQ ID NO: 106286
  peptide (1)..(166): Ceres Seq. ID no. 13650424

SEQ ID NO: 118731 - protein, 128 aa, Arabidopsis thaliana; identical to SEQ ID NO: 106287
  peptide (1)..(128): Ceres Seq. ID no. 13650425

SEQ ID NO: 118732 - DNA, 1333 bp, Arabidopsis thaliana; identical to SEQ ID NO: 107493
  misc_feature (1)..(1333): Ceres Seq. ID no. 13650443
  misc_feature (1)..(1333): Ortholog of  Ceres SEQ ID NO 13595351 as cited in SEQ ID NO 55934
  misc_feature (1)..(1333): Ortholog of  Ceres SEQ ID NO 13639645 as cited in SEQ ID NO 57488

SEQ ID NO: 118733 - protein, 357 aa, Arabidopsis thaliana; identical to SEQ ID NO: 107494
  peptide (1)..(357): Ceres Seq. ID no. 13650444

SEQ ID NO: 118734 - protein, 339 aa, Arabidopsis thaliana; identical to SEQ ID NO: 107495
  peptide (1)..(339): Ceres Seq. ID no. 13650445

SEQ ID NO: 118735 - protein, 334 aa, Arabidopsis thaliana; identical to SEQ ID NO: 107496
  peptide (1)..(334): Ceres Seq. ID no. 13650446

SEQ ID NO: 118736 - DNA, 1028 bp, Arabidopsis thaliana; identical to SEQ ID NO: 107497
  misc_feature (1)..(1028): Ceres Seq. ID no. 13650455
  misc_feature (1)..(1028): Ortholog of  Ceres SEQ ID NO 12562983 as cited in SEQ ID NO 53309

SEQ ID NO: 118737 - protein, 163 aa, Arabidopsis thaliana; identical to SEQ ID NO: 107498
  peptide (1)..(163): Ceres Seq. ID no. 13650456

SEQ ID NO: 118738 - protein, 160 aa, Arabidopsis thaliana; identical to SEQ ID NO: 107499
  peptide (1)..(160): Ceres Seq. ID no. 13650457

SEQ ID NO: 118739 - protein, 143 aa, Arabidopsis thaliana; identical to SEQ ID NO: 107500
  peptide (1)..(143): Ceres Seq. ID no. 13650458

SEQ ID NO: 118740 - DNA, 1672 bp, Arabidopsis thaliana; identical to SEQ ID NO: 107501
  misc_feature (1)..(1672): Ceres Seq. ID no. 13650484
  misc_feature (1)..(1672): Ortholog of  Ceres SEQ ID NO 13600310 as cited in SEQ ID NO 5086

SEQ ID NO: 118741 - protein, 465 aa, Arabidopsis thaliana; identical to SEQ ID NO: 107502
  peptide (1)..(465): Ceres Seq. ID no. 13650485

SEQ ID NO: 118742 - protein, 448 aa, Arabidopsis thaliana; identical to SEQ ID NO: 107503
  peptide (1)..(448): Ceres Seq. ID no. 13650486

SEQ ID NO: 118743 - protein, 394 aa, Arabidopsis thaliana; identical to SEQ ID NO: 107504
  peptide (1)..(394): Ceres Seq. ID no. 13650487

SEQ ID NO: 118744 - DNA, 1079 bp, Arabidopsis thaliana; identical to SEQ ID NO: 107505
  misc_feature (1)..(1079): Ceres Seq. ID no. 13650523
  misc_feature (1)..(1079): Ortholog of  Ceres SEQ ID NO 12616669 as cited in SEQ ID NO 63669

SEQ ID NO: 118745 - protein, 286 aa, Arabidopsis thaliana; identical to SEQ ID NO: 107506
  peptide (1)..(286): Ceres Seq. ID no. 13650524

SEQ ID NO: 118746 - DNA, 1145 bp, Arabidopsis thaliana; identical to SEQ ID NO: 107507
  misc_feature (1)..(1145): Ceres Seq. ID no. 13650529
  misc_feature (1)..(1145): Ortholog of  Ceres SEQ ID NO 13596944 as cited in SEQ ID NO 68910

SEQ ID NO: 118747 - protein, 346 aa, Arabidopsis thaliana; identical to SEQ ID NO: 107508
  peptide (1)..(346): Ceres Seq. ID no. 13650530

SEQ ID NO: 118748 - protein, 338 aa, Arabidopsis thaliana; identical to SEQ ID NO: 101930
  peptide (1)..(338): Ceres Seq. ID no. 13650531

SEQ ID NO: 118749 - protein, 335 aa, Arabidopsis thaliana; identical to SEQ ID NO: 87862
  peptide (1)..(335): Ceres Seq. ID no. 13650532

SEQ ID NO: 118750 - DNA, 673 bp, Arabidopsis thaliana; identical to SEQ ID NO: 107511
  misc_feature (1)..(673): Ceres Seq. ID no. 13650533
  misc_feature (1)..(673): Ortholog of  Ceres SEQ ID NO 12609177 as cited in SEQ ID NO 55753
  misc_feature (1)..(673): Ortholog of  Ceres SEQ ID NO 14309346 as cited in SEQ ID NO 0

SEQ ID NO: 118751 - protein, 56 aa, Arabidopsis thaliana; identical to SEQ ID NO: 107512
  peptide (1)..(56): Ceres Seq. ID no. 13650534

SEQ ID NO: 118752 - protein, 42 aa, Arabidopsis thaliana; identical to SEQ ID NO: 107513
  peptide (1)..(42): Ceres Seq. ID no. 13650535

SEQ ID NO: 118753 - DNA, 1109 bp, Arabidopsis thaliana; identical to SEQ ID NO: 107514
  misc_feature (1)..(1109): Ceres Seq. ID no. 13650556
  misc_feature (1)..(1109): Ortholog of  Ceres SEQ ID NO 13599348 as cited in SEQ ID NO 0

SEQ ID NO: 118754 - protein, 294 aa, Arabidopsis thaliana; identical to SEQ ID NO: 107515
  peptide (1)..(294): Ceres Seq. ID no. 13650557

SEQ ID NO: 118755 - protein, 288 aa, Arabidopsis thaliana; identical to SEQ ID NO: 107516
  peptide (1)..(288): Ceres Seq. ID no. 13650558

SEQ ID NO: 118756 - protein, 238 aa, Arabidopsis thaliana; identical to SEQ ID NO: 107517
  peptide (1)..(238): Ceres Seq. ID no. 13650559

SEQ ID NO: 118757 - DNA, 1126 bp, Arabidopsis thaliana; identical to SEQ ID NO: 107518
  misc_feature (1)..(1126): Ceres Seq. ID no. 13650568
  misc_feature (1)..(1126): Ortholog of  Ceres SEQ ID NO 15179873 as cited in SEQ ID NO 66846

SEQ ID NO: 118758 - protein, 257 aa, Arabidopsis thaliana; identical to SEQ ID NO: 42493
  peptide (1)..(257): Ceres Seq. ID no. 13650569

SEQ ID NO: 118759 - protein, 233 aa, Arabidopsis thaliana; identical to SEQ ID NO: 42494
  peptide (1)..(233): Ceres Seq. ID no. 13650570

SEQ ID NO: 118760 - protein, 217 aa, Arabidopsis thaliana; identical to SEQ ID NO: 42495
  peptide (1)..(217): Ceres Seq. ID no. 13650571

SEQ ID NO: 118761 - DNA, 2984 bp, Arabidopsis thaliana; identical to SEQ ID NO: 107522
  misc_feature (1)..(2984): Ceres Seq. ID no. 13650576
  misc_feature (1)..(2984): Ortholog of  Ceres SEQ ID NO 13594958 as cited in SEQ ID NO 55996
  misc_feature (1)..(2984): Ortholog of  Ceres SEQ ID NO 15180204 as cited in SEQ ID NO 0

SEQ ID NO: 118762 - protein, 408 aa, Arabidopsis thaliana; identical to SEQ ID NO: 107523
  peptide (1)..(408): Ceres Seq. ID no. 13650577

SEQ ID NO: 118763 - protein, 367 aa, Arabidopsis thaliana; identical to SEQ ID NO: 107524
  peptide (1)..(367): Ceres Seq. ID no. 13650578

SEQ ID NO: 118764 - protein, 276 aa, Arabidopsis thaliana; identical to SEQ ID NO: 107525
  peptide (1)..(276): Ceres Seq. ID no. 13650579

SEQ ID NO: 118765 - DNA, 1046 bp, Arabidopsis thaliana; identical to SEQ ID NO: 107526
  misc_feature (1)..(1046): Ceres Seq. ID no. 13650610
  misc_feature (1)..(1046): Ortholog of  Ceres SEQ ID NO 15168580 as cited in SEQ ID NO 60279

SEQ ID NO: 118766 - protein, 293 aa, Arabidopsis thaliana; identical to SEQ ID NO: 99479
  peptide (1)..(293): Ceres Seq. ID no. 13650611

SEQ ID NO: 118767 - protein, 275 aa, Arabidopsis thaliana; identical to SEQ ID NO: 99480
  peptide (1)..(275): Ceres Seq. ID no. 13650612

SEQ ID NO: 118768 - protein, 261 aa, Arabidopsis thaliana; identical to SEQ ID NO: 99481
  peptide (1)..(261): Ceres Seq. ID no. 13650613

SEQ ID NO: 118769 - DNA, 699 bp, Arabidopsis thaliana; identical to SEQ ID NO: 107530
  misc_feature (1)..(699): Ceres Seq. ID no. 13650614
  misc_feature (1)..(699): Ortholog of  Ceres SEQ ID NO 15171228 as cited in SEQ ID NO 56948

SEQ ID NO: 118770 - protein, 211 aa, Arabidopsis thaliana; identical to SEQ ID NO: 107531
  peptide (1)..(211): Ceres Seq. ID no. 13650615

SEQ ID NO: 118771 - protein, 191 aa, Arabidopsis thaliana; identical to SEQ ID NO: 79741
  peptide (1)..(191): Ceres Seq. ID no. 13650616

SEQ ID NO: 118772 - protein, 128 aa, Arabidopsis thaliana; identical to SEQ ID NO: 79742
  peptide (1)..(128): Ceres Seq. ID no. 13650617

SEQ ID NO: 118773 - DNA, 2534 bp, Arabidopsis thaliana; identical to SEQ ID NO: 107534
  misc_feature (1)..(2534): Ceres Seq. ID no. 13650622
  misc_feature (1)..(2534): Ortholog of  Ceres SEQ ID NO 13599900 as cited in SEQ ID NO 531
  misc_feature (1)..(2534): Ortholog of  Ceres SEQ ID NO 15171402 as cited in SEQ ID NO 51174
  misc_feature (1)..(2534): Ortholog of  Ceres SEQ ID NO 13596509 as cited in SEQ ID NO 62004
  misc_feature (1)..(2534): Ortholog of  Ceres SEQ ID NO 13659971 as cited in SEQ ID NO 67565
  misc_feature (1)..(2534): Ortholog of  Ceres SEQ ID NO 13500385 as cited in SEQ ID NO 67583

SEQ ID NO: 118774 - protein, 659 aa, Arabidopsis thaliana; identical to SEQ ID NO: 107535
  peptide (1)..(659): Ceres Seq. ID no. 13650623

SEQ ID NO: 118775 - protein, 647 aa, Arabidopsis thaliana; identical to SEQ ID NO: 107536
  peptide (1)..(647): Ceres Seq. ID no. 13650624

SEQ ID NO: 118776 - protein, 627 aa, Arabidopsis thaliana; identical to SEQ ID NO: 107537
  peptide (1)..(627): Ceres Seq. ID no. 13650625

SEQ ID NO: 118777 - DNA, 1877 bp, Arabidopsis thaliana; identical to SEQ ID NO: 107538
  misc_feature (1)..(1877): Ceres Seq. ID no. 13650633
  misc_feature (1)..(1877): Ortholog of  Ceres SEQ ID NO 12616225 as cited in SEQ ID NO 68930

SEQ ID NO: 118778 - protein, 586 aa, Arabidopsis thaliana; identical to SEQ ID NO: 107539
  peptide (1)..(586): Ceres Seq. ID no. 13650634

SEQ ID NO: 118779 - protein, 559 aa, Arabidopsis thaliana; identical to SEQ ID NO: 107540
  peptide (1)..(559): Ceres Seq. ID no. 13650635

SEQ ID NO: 118780 - protein, 484 aa, Arabidopsis thaliana; identical to SEQ ID NO: 107541
  peptide (1)..(484): Ceres Seq. ID no. 13650636

SEQ ID NO: 118781 - DNA, 1244 bp, Arabidopsis thaliana; identical to SEQ ID NO: 107542
  misc_feature (1)..(1244): Ceres Seq. ID no. 13650644
  misc_feature (1)..(1244): Ortholog of  Ceres SEQ ID NO 14311243 as cited in SEQ ID NO 20434
  misc_feature (1)..(1244): Ortholog of  Ceres SEQ ID NO 12609528 as cited in SEQ ID NO 51902

SEQ ID NO: 118782 - protein, 296 aa, Arabidopsis thaliana; identical to SEQ ID NO: 107543
  peptide (1)..(296): Ceres Seq. ID no. 13650645

SEQ ID NO: 118783 - protein, 164 aa, Arabidopsis thaliana; identical to SEQ ID NO: 107544
  peptide (1)..(164): Ceres Seq. ID no. 13650646

SEQ ID NO: 118784 - DNA, 926 bp, Arabidopsis thaliana; identical to SEQ ID NO: 107545
  misc_feature (1)..(926): Ceres Seq. ID no. 13650650
  misc_feature (1)..(926): Ortholog of  Ceres SEQ ID NO 12616324 as cited in SEQ ID NO 63414

SEQ ID NO: 118785 - protein, 176 aa, Arabidopsis thaliana; identical to SEQ ID NO: 25833
  peptide (1)..(176): Ceres Seq. ID no. 13650651

SEQ ID NO: 118786 - DNA, 660 bp, Arabidopsis thaliana; identical to SEQ ID NO: 107547
  misc_feature (1)..(660): Ceres Seq. ID no. 13650658
  misc_feature (1)..(660): Ortholog of  Ceres SEQ ID NO 15174240 as cited in SEQ ID NO 61866

SEQ ID NO: 118787 - protein, 154 aa, Arabidopsis thaliana; identical to SEQ ID NO: 99020
  peptide (1)..(154): Ceres Seq. ID no. 13650659

SEQ ID NO: 118788 - protein, 77 aa, Arabidopsis thaliana; identical to SEQ ID NO: 99021
  peptide (1)..(77): Ceres Seq. ID no. 13650660

SEQ ID NO: 118789 - DNA, 882 bp, Arabidopsis thaliana; identical to SEQ ID NO: 107550
  misc_feature (1)..(882): Ceres Seq. ID no. 13650661
  misc_feature (1)..(882): Ortholog of  Ceres SEQ ID NO 14315338 as cited in SEQ ID NO 60283

SEQ ID NO: 118790 - protein, 176 aa, Arabidopsis thaliana; identical to SEQ ID NO: 107551
  peptide (1)..(176): Ceres Seq. ID no. 13650662

SEQ ID NO: 118791 - protein, 163 aa, Arabidopsis thaliana; identical to SEQ ID NO: 107552
  peptide (1)..(163): Ceres Seq. ID no. 13650663

SEQ ID NO: 118792 - DNA, 1268 bp, Arabidopsis thaliana; identical to SEQ ID NO: 107553
  misc_feature (1)..(1268): Ceres Seq. ID no. 13650695
  misc_feature (1)..(1268): Ortholog of  Ceres SEQ ID NO 13654431 as cited in SEQ ID NO 67761

SEQ ID NO: 118793 - protein, 325 aa, Arabidopsis thaliana; identical to SEQ ID NO: 107554
  peptide (1)..(325): Ceres Seq. ID no. 13650696

SEQ ID NO: 118794 - protein, 306 aa, Arabidopsis thaliana; identical to SEQ ID NO: 107555
  peptide (1)..(306): Ceres Seq. ID no. 13650697

SEQ ID NO: 118795 - protein, 291 aa, Arabidopsis thaliana; identical to SEQ ID NO: 107556
  peptide (1)..(291): Ceres Seq. ID no. 13650698

SEQ ID NO: 118796 - DNA, 453 bp, Arabidopsis thaliana; identical to SEQ ID NO: 107557
  misc_feature (1)..(453): Ceres Seq. ID no. 13650699
  misc_feature (1)..(453): Ortholog of  Ceres SEQ ID NO 15179001 as cited in SEQ ID NO 0

SEQ ID NO: 118797 - protein, 106 aa, Arabidopsis thaliana; identical to SEQ ID NO: 107558
  peptide (1)..(106): Ceres Seq. ID no. 13650700

SEQ ID NO: 118798 - protein, 99 aa, Arabidopsis thaliana; identical to SEQ ID NO: 107559
  peptide (1)..(99): Ceres Seq. ID no. 13650701

SEQ ID NO: 118799 - DNA, 1546 bp, Arabidopsis thaliana; identical to SEQ ID NO: 107560
  misc_feature (1)..(1546): Ceres Seq. ID no. 13650705

SEQ ID NO: 118800 - protein, 420 aa, Arabidopsis thaliana; identical to SEQ ID NO: 107561
  peptide (1)..(420): Ceres Seq. ID no. 13650706

SEQ ID NO: 118801 - protein, 398 aa, Arabidopsis thaliana; identical to SEQ ID NO: 107562
  peptide (1)..(398): Ceres Seq. ID no. 13650707

SEQ ID NO: 118802 - protein, 366 aa, Arabidopsis thaliana; identical to SEQ ID NO: 107563
  peptide (1)..(366): Ceres Seq. ID no. 13650708

SEQ ID NO: 118803 - DNA, 1265 bp, Arabidopsis thaliana; identical to SEQ ID NO: 107564
  misc_feature (1)..(1265): Ceres Seq. ID no. 13650709
  misc_feature (1)..(1265): Ortholog of  Ceres SEQ ID NO 15179824 as cited in SEQ ID NO 66250
  misc_feature (1)..(1265): Ortholog of  Ceres SEQ ID NO 13657872 as cited in SEQ ID NO 66357

SEQ ID NO: 118804 - protein, 349 aa, Arabidopsis thaliana; identical to SEQ ID NO: 107565
  peptide (1)..(349): Ceres Seq. ID no. 13650710

SEQ ID NO: 118805 - protein, 299 aa, Arabidopsis thaliana; identical to SEQ ID NO: 107566
  peptide (1)..(299): Ceres Seq. ID no. 13650711

SEQ ID NO: 118806 - protein, 272 aa, Arabidopsis thaliana; identical to SEQ ID NO: 107567
  peptide (1)..(272): Ceres Seq. ID no. 13650712

SEQ ID NO: 118807 - DNA, 2117 bp, Arabidopsis thaliana; identical to SEQ ID NO: 107568
  misc_feature (1)..(2117): Ceres Seq. ID no. 13650719
  misc_feature (1)..(2117): Ortholog of  Ceres SEQ ID NO 15174879 as cited in SEQ ID NO 53786

SEQ ID NO: 118808 - protein, 308 aa, Arabidopsis thaliana; identical to SEQ ID NO: 107569
  peptide (1)..(308): Ceres Seq. ID no. 13650720

SEQ ID NO: 118809 - protein, 230 aa, Arabidopsis thaliana; identical to SEQ ID NO: 107570
  peptide (1)..(230): Ceres Seq. ID no. 13650721

SEQ ID NO: 118810 - protein, 228 aa, Arabidopsis thaliana; identical to SEQ ID NO: 107571
  peptide (1)..(228): Ceres Seq. ID no. 13650722

SEQ ID NO: 118811 - DNA, 1122 bp, Arabidopsis thaliana; identical to SEQ ID NO: 107572
  misc_feature (1)..(1122): Ceres Seq. ID no. 13650734
  misc_feature (1)..(1122): Ortholog of  Ceres SEQ ID NO 15175949 as cited in SEQ ID NO 58819
  misc_feature (1)..(1122): Ortholog of  Ceres SEQ ID NO 13596660 as cited in SEQ ID NO 63180

SEQ ID NO: 118812 - protein, 286 aa, Arabidopsis thaliana; identical to SEQ ID NO: 107573
  peptide (1)..(286): Ceres Seq. ID no. 13650735

SEQ ID NO: 118813 - protein, 260 aa, Arabidopsis thaliana; identical to SEQ ID NO: 107574
  peptide (1)..(260): Ceres Seq. ID no. 13650736

SEQ ID NO: 118814 - protein, 253 aa, Arabidopsis thaliana; identical to SEQ ID NO: 107575
  peptide (1)..(253): Ceres Seq. ID no. 13650737

SEQ ID NO: 118815 - DNA, 1181 bp, Arabidopsis thaliana; identical to SEQ ID NO: 107576
  misc_feature (1)..(1181): Ceres Seq. ID no. 13650738
  misc_feature (1)..(1181): Ortholog of  Ceres SEQ ID NO 12625452 as cited in SEQ ID NO 63642

SEQ ID NO: 118816 - protein, 216 aa, Arabidopsis thaliana; identical to SEQ ID NO: 107577
  peptide (1)..(216): Ceres Seq. ID no. 13650739

SEQ ID NO: 118817 - protein, 201 aa, Arabidopsis thaliana; identical to SEQ ID NO: 107578
  peptide (1)..(201): Ceres Seq. ID no. 13650740

SEQ ID NO: 118818 - protein, 125 aa, Arabidopsis thaliana; identical to SEQ ID NO: 107579
  peptide (1)..(125): Ceres Seq. ID no. 13650741

SEQ ID NO: 118819 - DNA, 1530 bp, Arabidopsis thaliana; identical to SEQ ID NO: 107580
  misc_feature (1)..(1530): Ceres Seq. ID no. 13650750
  misc_feature (1)..(1530): Ortholog of  Ceres SEQ ID NO 13596816 as cited in SEQ ID NO 62287

SEQ ID NO: 118820 - protein, 294 aa, Arabidopsis thaliana; identical to SEQ ID NO: 107581
  peptide (1)..(294): Ceres Seq. ID no. 13650751

SEQ ID NO: 118821 - protein, 235 aa, Arabidopsis thaliana; identical to SEQ ID NO: 107582
  peptide (1)..(235): Ceres Seq. ID no. 13650752

SEQ ID NO: 118822 - protein, 199 aa, Arabidopsis thaliana; identical to SEQ ID NO: 107583
  peptide (1)..(199): Ceres Seq. ID no. 13650753

SEQ ID NO: 118823 - DNA, 987 bp, Arabidopsis thaliana; identical to SEQ ID NO: 107584
  misc_feature (1)..(987): Ceres Seq. ID no. 13650754
  misc_feature (1)..(987): Ortholog of  Ceres SEQ ID NO 13596891 as cited in SEQ ID NO 62868
  misc_feature (1)..(987): Ortholog of  Ceres SEQ ID NO 12617235 as cited in SEQ ID NO 63990
  misc_feature (1)..(987): Ortholog of  Ceres SEQ ID NO 13655371 as cited in SEQ ID NO 68945

SEQ ID NO: 118824 - protein, 239 aa, Arabidopsis thaliana; identical to SEQ ID NO: 107585
  peptide (1)..(239): Ceres Seq. ID no. 13650755

SEQ ID NO: 118825 - protein, 208 aa, Arabidopsis thaliana; identical to SEQ ID NO: 107586
  peptide (1)..(208): Ceres Seq. ID no. 13650756

SEQ ID NO: 118826 - protein, 205 aa, Arabidopsis thaliana; identical to SEQ ID NO: 107587
  peptide (1)..(205): Ceres Seq. ID no. 13650757

SEQ ID NO: 118827 - DNA, 2595 bp, Arabidopsis thaliana; identical to SEQ ID NO: 107588
  misc_feature (1)..(2595): Ceres Seq. ID no. 13650780
  misc_feature (1)..(2595): Ortholog of  Ceres SEQ ID NO 14315469 as cited in SEQ ID NO 57169
  misc_feature (1)..(2595): Ortholog of  Ceres SEQ ID NO 13657008 as cited in SEQ ID NO 69164

SEQ ID NO: 118828 - protein, 532 aa, Arabidopsis thaliana; identical to SEQ ID NO: 107589
  peptide (1)..(532): Ceres Seq. ID no. 13650781

SEQ ID NO: 118829 - protein, 524 aa, Arabidopsis thaliana; identical to SEQ ID NO: 107590
  peptide (1)..(524): Ceres Seq. ID no. 13650782

SEQ ID NO: 118830 - protein, 509 aa, Arabidopsis thaliana; identical to SEQ ID NO: 107591
  peptide (1)..(509): Ceres Seq. ID no. 13650783

SEQ ID NO: 118831 - DNA, 945 bp, Arabidopsis thaliana; identical to SEQ ID NO: 107592
  misc_feature (1)..(945): Ceres Seq. ID no. 13650792
  misc_feature (1)..(945): Ortholog of  Ceres SEQ ID NO 15173624 as cited in SEQ ID NO 60470

SEQ ID NO: 118832 - protein, 186 aa, Arabidopsis thaliana; identical to SEQ ID NO: 107593
  peptide (1)..(186): Ceres Seq. ID no. 13650793

SEQ ID NO: 118833 - protein, 137 aa, Arabidopsis thaliana; identical to SEQ ID NO: 80216
  peptide (1)..(137): Ceres Seq. ID no. 13650794

SEQ ID NO: 118834 - DNA, 3029 bp, Arabidopsis thaliana; identical to SEQ ID NO: 107595
  misc_feature (1)..(3029): Ceres Seq. ID no. 13650817
  misc_feature (1)..(3029): Ortholog of  Ceres SEQ ID NO 14311371 as cited in SEQ ID NO 54002
  misc_feature (1)..(3029): Ortholog of  Ceres SEQ ID NO 14308339 as cited in SEQ ID NO 60396

SEQ ID NO: 118835 - protein, 853 aa, Arabidopsis thaliana; identical to SEQ ID NO: 107596
  peptide (1)..(853): Ceres Seq. ID no. 13650818

SEQ ID NO: 118836 - protein, 844 aa, Arabidopsis thaliana; identical to SEQ ID NO: 107597
  peptide (1)..(844): Ceres Seq. ID no. 13650819

SEQ ID NO: 118837 - protein, 841 aa, Arabidopsis thaliana; identical to SEQ ID NO: 107598
  peptide (1)..(841): Ceres Seq. ID no. 13650820

SEQ ID NO: 118838 - DNA, 2772 bp, Arabidopsis thaliana; identical to SEQ ID NO: 107599
  misc_feature (1)..(2772): Ceres Seq. ID no. 13650829
  misc_feature (1)..(2772): Ortholog of  Ceres SEQ ID NO 13654989 as cited in SEQ ID NO 63117
  misc_feature (1)..(2772): Ortholog of  Ceres SEQ ID NO 13584744 as cited in SEQ ID NO 69137

SEQ ID NO: 118839 - protein, 780 aa, Arabidopsis thaliana; identical to SEQ ID NO: 107600
  peptide (1)..(780): Ceres Seq. ID no. 13650830

SEQ ID NO: 118840 - protein, 656 aa, Arabidopsis thaliana; identical to SEQ ID NO: 107601
  peptide (1)..(656): Ceres Seq. ID no. 13650831

SEQ ID NO: 118841 - protein, 609 aa, Arabidopsis thaliana; identical to SEQ ID NO: 107602
  peptide (1)..(609): Ceres Seq. ID no. 13650832

SEQ ID NO: 118842 - DNA, 847 bp, Arabidopsis thaliana; identical to SEQ ID NO: 107603
  misc_feature (1)..(847): Ceres Seq. ID no. 13650837
  misc_feature (1)..(847): Ortholog of  Ceres SEQ ID NO 12608028 as cited in SEQ ID NO 57065

SEQ ID NO: 118843 - protein, 230 aa, Arabidopsis thaliana; identical to SEQ ID NO: 107604
  peptide (1)..(230): Ceres Seq. ID no. 13650838

SEQ ID NO: 118844 - protein, 226 aa, Arabidopsis thaliana; identical to SEQ ID NO: 107605
  peptide (1)..(226): Ceres Seq. ID no. 13650839

SEQ ID NO: 118845 - DNA, 1009 bp, Arabidopsis thaliana; identical to SEQ ID NO: 107606
  misc_feature (1)..(1009): Ceres Seq. ID no. 13650840
  misc_feature (1)..(1009): Ortholog of  Ceres SEQ ID NO 12620190 as cited in SEQ ID NO 66274

SEQ ID NO: 118846 - protein, 264 aa, Arabidopsis thaliana; identical to SEQ ID NO: 107607
  peptide (1)..(264): Ceres Seq. ID no. 13650841

SEQ ID NO: 118847 - protein, 258 aa, Arabidopsis thaliana; identical to SEQ ID NO: 107608
  peptide (1)..(258): Ceres Seq. ID no. 13650842

SEQ ID NO: 118848 - protein, 241 aa, Arabidopsis thaliana; identical to SEQ ID NO: 43398
  peptide (1)..(241): Ceres Seq. ID no. 13650843

SEQ ID NO: 118849 - DNA, 1824 bp, Arabidopsis thaliana; identical to SEQ ID NO: 107610
  misc_feature (1)..(1824): Ceres Seq. ID no. 13650852
  misc_feature (1)..(1824): Ortholog of  Ceres SEQ ID NO 14311553 as cited in SEQ ID NO 51462
  misc_feature (1)..(1824): Ortholog of  Ceres SEQ ID NO 13599003 as cited in SEQ ID NO 0

SEQ ID NO: 118850 - protein, 402 aa, Arabidopsis thaliana; identical to SEQ ID NO: 72290
  peptide (1)..(402): Ceres Seq. ID no. 13650853

SEQ ID NO: 118851 - protein, 316 aa, Arabidopsis thaliana; identical to SEQ ID NO: 72291
  peptide (1)..(316): Ceres Seq. ID no. 13650854

SEQ ID NO: 118852 - protein, 290 aa, Arabidopsis thaliana; identical to SEQ ID NO: 107613
  peptide (1)..(290): Ceres Seq. ID no. 13650855

SEQ ID NO: 118853 - DNA, 695 bp, Arabidopsis thaliana; identical to SEQ ID NO: 107614
  misc_feature (1)..(695): Ceres Seq. ID no. 13650871
  misc_feature (1)..(695): Ortholog of  Ceres SEQ ID NO 15173047 as cited in SEQ ID NO 61816
  misc_feature (1)..(695): Ortholog of  Ceres SEQ ID NO 13591134 as cited in SEQ ID NO 63820
  misc_feature (1)..(695): Ortholog of  Ceres SEQ ID NO 15178530 as cited in SEQ ID NO 67823
  misc_feature (1)..(695): Ortholog of  Ceres SEQ ID NO 13599565 as cited in SEQ ID NO 0

SEQ ID NO: 118854 - protein, 160 aa, Arabidopsis thaliana; identical to SEQ ID NO: 107615
  peptide (1)..(160): Ceres Seq. ID no. 13650872

SEQ ID NO: 118855 - protein, 139 aa, Arabidopsis thaliana; identical to SEQ ID NO: 72697
  peptide (1)..(139): Ceres Seq. ID no. 13650873

SEQ ID NO: 118856 - DNA, 1339 bp, Arabidopsis thaliana; identical to SEQ ID NO: 107617
  misc_feature (1)..(1339): Ceres Seq. ID no. 13650890
  misc_feature (1)..(1339): Ortholog of  Ceres SEQ ID NO 13596404 as cited in SEQ ID NO 61966

SEQ ID NO: 118857 - protein, 72 aa, Arabidopsis thaliana; identical to SEQ ID NO: 107618
  peptide (1)..(72): Ceres Seq. ID no. 13650891

SEQ ID NO: 118858 - protein, 68 aa, Arabidopsis thaliana; identical to SEQ ID NO: 107619
  peptide (1)..(68): Ceres Seq. ID no. 13650892

SEQ ID NO: 118859 - protein, 67 aa, Arabidopsis thaliana; identical to SEQ ID NO: 107620
  peptide (1)..(67): Ceres Seq. ID no. 13650893

SEQ ID NO: 118860 - DNA, 1291 bp, Arabidopsis thaliana; identical to SEQ ID NO: 107621
  misc_feature (1)..(1291): Ceres Seq. ID no. 13650902
  misc_feature (1)..(1291): Ortholog of  Ceres SEQ ID NO 13637939 as cited in SEQ ID NO 54930
  misc_feature (1)..(1291): Ortholog of  Ceres SEQ ID NO 13584164 as cited in SEQ ID NO 63681

SEQ ID NO: 118861 - protein, 176 aa, Arabidopsis thaliana; identical to SEQ ID NO: 107622
  peptide (1)..(176): Ceres Seq. ID no. 13650903

SEQ ID NO: 118862 - protein, 169 aa, Arabidopsis thaliana; identical to SEQ ID NO: 107623
  peptide (1)..(169): Ceres Seq. ID no. 13650904

SEQ ID NO: 118863 - protein, 157 aa, Arabidopsis thaliana; identical to SEQ ID NO: 107624
  peptide (1)..(157): Ceres Seq. ID no. 13650905

SEQ ID NO: 118864 - DNA, 1077 bp, Arabidopsis thaliana; identical to SEQ ID NO: 107625
  misc_feature (1)..(1077): Ceres Seq. ID no. 13650914
  misc_feature (1)..(1077): Ortholog of  Ceres SEQ ID NO 13596163 as cited in SEQ ID NO 60864
  misc_feature (1)..(1077): Ortholog of  Ceres SEQ ID NO 15226347 as cited in SEQ ID NO 61639

SEQ ID NO: 118865 - protein, 167 aa, Arabidopsis thaliana; identical to SEQ ID NO: 89257
  peptide (1)..(167): Ceres Seq. ID no. 13650915

SEQ ID NO: 118866 - protein, 113 aa, Arabidopsis thaliana; identical to SEQ ID NO: 89258
  peptide (1)..(113): Ceres Seq. ID no. 13650916

SEQ ID NO: 118867 - protein, 98 aa, Arabidopsis thaliana; identical to SEQ ID NO: 89259
  peptide (1)..(98): Ceres Seq. ID no. 13650917

SEQ ID NO: 118868 - DNA, 1134 bp, Arabidopsis thaliana; identical to SEQ ID NO: 107629
  misc_feature (1)..(1134): Ceres Seq. ID no. 13650922
  misc_feature (1)..(1134): Ortholog of  Ceres SEQ ID NO 13647648 as cited in SEQ ID NO 20346
  misc_feature (1)..(1134): Ortholog of  Ceres SEQ ID NO 15179852 as cited in SEQ ID NO 66623

SEQ ID NO: 118869 - protein, 239 aa, Arabidopsis thaliana; identical to SEQ ID NO: 107630
  peptide (1)..(239): Ceres Seq. ID no. 13650923

SEQ ID NO: 118870 - protein, 221 aa, Arabidopsis thaliana; identical to SEQ ID NO: 20348
  peptide (1)..(221): Ceres Seq. ID no. 13650924

SEQ ID NO: 118871 - protein, 213 aa, Arabidopsis thaliana; identical to SEQ ID NO: 20349
  peptide (1)..(213): Ceres Seq. ID no. 13650925

SEQ ID NO: 118872 - DNA, 1552 bp, Arabidopsis thaliana; identical to SEQ ID NO: 107633
  misc_feature (1)..(1552): Ceres Seq. ID no. 13650955
  misc_feature (1)..(1552): Ortholog of  Ceres SEQ ID NO 13639663 as cited in SEQ ID NO 57850

SEQ ID NO: 118873 - protein, 425 aa, Arabidopsis thaliana; identical to SEQ ID NO: 107634
  peptide (1)..(425): Ceres Seq. ID no. 13650956

SEQ ID NO: 118874 - protein, 408 aa, Arabidopsis thaliana; identical to SEQ ID NO: 107635
  peptide (1)..(408): Ceres Seq. ID no. 13650957

SEQ ID NO: 118875 - DNA, 2003 bp, Arabidopsis thaliana; identical to SEQ ID NO: 107636
  misc_feature (1)..(2003): Ceres Seq. ID no. 13651026
  misc_feature (1)..(2003): Ortholog of  Ceres SEQ ID NO 13594317 as cited in SEQ ID NO 57796

SEQ ID NO: 118876 - protein, 541 aa, Arabidopsis thaliana; identical to SEQ ID NO: 107637
  peptide (1)..(541): Ceres Seq. ID no. 13651027

SEQ ID NO: 118877 - protein, 483 aa, Arabidopsis thaliana; identical to SEQ ID NO: 107638
  peptide (1)..(483): Ceres Seq. ID no. 13651028

SEQ ID NO: 118878 - protein, 471 aa, Arabidopsis thaliana; identical to SEQ ID NO: 107639
  peptide (1)..(471): Ceres Seq. ID no. 13651029

SEQ ID NO: 118879 - DNA, 1577 bp, Arabidopsis thaliana; identical to SEQ ID NO: 107640
  misc_feature (1)..(1577): Ceres Seq. ID no. 13651034
  misc_feature (1)..(1577): Ortholog of  Ceres SEQ ID NO 14314567 as cited in SEQ ID NO 52335
  misc_feature (1)..(1577): Ortholog of  Ceres SEQ ID NO 13595437 as cited in SEQ ID NO 56562
  misc_feature (1)..(1577): Ortholog of  Ceres SEQ ID NO 14315985 as cited in SEQ ID NO 57720

SEQ ID NO: 118880 - protein, 404 aa, Arabidopsis thaliana; identical to SEQ ID NO: 107641
  peptide (1)..(404): Ceres Seq. ID no. 13651035

SEQ ID NO: 118881 - protein, 230 aa, Arabidopsis thaliana; identical to SEQ ID NO: 72979
  peptide (1)..(230): Ceres Seq. ID no. 13651036

SEQ ID NO: 118882 - protein, 227 aa, Arabidopsis thaliana; identical to SEQ ID NO: 72980
  peptide (1)..(227): Ceres Seq. ID no. 13651037

SEQ ID NO: 118883 - DNA, 1500 bp, Arabidopsis thaliana; identical to SEQ ID NO: 107644
  misc_feature (1)..(1500): Ceres Seq. ID no. 13651094
  misc_feature (1)..(1500): Ortholog of  Ceres SEQ ID NO 15170099 as cited in SEQ ID NO 66491

SEQ ID NO: 118884 - protein, 305 aa, Arabidopsis thaliana; identical to SEQ ID NO: 107645
  peptide (1)..(305): Ceres Seq. ID no. 13651095

SEQ ID NO: 118885 - protein, 206 aa, Arabidopsis thaliana; identical to SEQ ID NO: 107646
  peptide (1)..(206): Ceres Seq. ID no. 13651096

SEQ ID NO: 118886 - protein, 205 aa, Arabidopsis thaliana; identical to SEQ ID NO: 107647
  peptide (1)..(205): Ceres Seq. ID no. 13651097

SEQ ID NO: 118887 - DNA, 2320 bp, Arabidopsis thaliana; identical to SEQ ID NO: 107648
  misc_feature (1)..(2320): Ceres Seq. ID no. 13651145
  misc_feature (1)..(2320): Ortholog of  Ceres SEQ ID NO 13654989 as cited in SEQ ID NO 63117
  misc_feature (1)..(2320): Ortholog of  Ceres SEQ ID NO 13584744 as cited in SEQ ID NO 69137

SEQ ID NO: 118888 - protein, 670 aa, Arabidopsis thaliana; identical to SEQ ID NO: 107649
  peptide (1)..(670): Ceres Seq. ID no. 13651146

SEQ ID NO: 118889 - protein, 446 aa, Arabidopsis thaliana; identical to SEQ ID NO: 107650
  peptide (1)..(446): Ceres Seq. ID no. 13651147

SEQ ID NO: 118890 - protein, 416 aa, Arabidopsis thaliana; identical to SEQ ID NO: 107651
  peptide (1)..(416): Ceres Seq. ID no. 13651148

SEQ ID NO: 118891 - DNA, 2668 bp, Arabidopsis thaliana; identical to SEQ ID NO: 107652
  misc_feature (1)..(2668): Ceres Seq. ID no. 13651152
  misc_feature (1)..(2668): Ortholog of  Ceres SEQ ID NO 14314423 as cited in SEQ ID NO 52352

SEQ ID NO: 118892 - protein, 599 aa, Arabidopsis thaliana; identical to SEQ ID NO: 107653
  peptide (1)..(599): Ceres Seq. ID no. 13651153

SEQ ID NO: 118893 - protein, 582 aa, Arabidopsis thaliana; identical to SEQ ID NO: 107654
  peptide (1)..(582): Ceres Seq. ID no. 13651154

SEQ ID NO: 118894 - protein, 487 aa, Arabidopsis thaliana; identical to SEQ ID NO: 107655
  peptide (1)..(487): Ceres Seq. ID no. 13651155

SEQ ID NO: 118895 - DNA, 2225 bp, Arabidopsis thaliana; identical to SEQ ID NO: 107656
  misc_feature (1)..(2225): Ceres Seq. ID no. 13651156
  misc_feature (1)..(2225): Ortholog of  Ceres SEQ ID NO 15178310 as cited in SEQ ID NO 1089
  misc_feature (1)..(2225): Ortholog of  Ceres SEQ ID NO 14303173 as cited in SEQ ID NO 66550

SEQ ID NO: 118896 - protein, 604 aa, Arabidopsis thaliana; identical to SEQ ID NO: 107657
  peptide (1)..(604): Ceres Seq. ID no. 13651157

SEQ ID NO: 118897 - protein, 527 aa, Arabidopsis thaliana; identical to SEQ ID NO: 107658
  peptide (1)..(527): Ceres Seq. ID no. 13651158

SEQ ID NO: 118898 - protein, 484 aa, Arabidopsis thaliana; identical to SEQ ID NO: 107659
  peptide (1)..(484): Ceres Seq. ID no. 13651159

SEQ ID NO: 118899 - DNA, 963 bp, Arabidopsis thaliana; identical to SEQ ID NO: 107660
  misc_feature (1)..(963): Ceres Seq. ID no. 13651164
  misc_feature (1)..(963): Ortholog of  Ceres SEQ ID NO 13586635 as cited in SEQ ID NO 14217
  misc_feature (1)..(963): Ortholog of  Ceres SEQ ID NO 12616285 as cited in SEQ ID NO 63483

SEQ ID NO: 118900 - protein, 196 aa, Arabidopsis thaliana; identical to SEQ ID NO: 107661
  peptide (1)..(196): Ceres Seq. ID no. 13651165

SEQ ID NO: 118901 - protein, 178 aa, Arabidopsis thaliana; identical to SEQ ID NO: 107662
  peptide (1)..(178): Ceres Seq. ID no. 13651166

SEQ ID NO: 118902 - protein, 162 aa, Arabidopsis thaliana; identical to SEQ ID NO: 107663
  peptide (1)..(162): Ceres Seq. ID no. 13651167

SEQ ID NO: 118903 - DNA, 1567 bp, Arabidopsis thaliana; identical to SEQ ID NO: 107664
  misc_feature (1)..(1567): Ceres Seq. ID no. 13651180
  misc_feature (1)..(1567): Ortholog of  Ceres SEQ ID NO 13582281 as cited in SEQ ID NO 51014
  misc_feature (1)..(1567): Ortholog of  Ceres SEQ ID NO 15176795 as cited in SEQ ID NO 54453
  misc_feature (1)..(1567): Ortholog of  Ceres SEQ ID NO 14310508 as cited in SEQ ID NO 58965
  misc_feature (1)..(1567): Ortholog of  Ceres SEQ ID NO 12617417 as cited in SEQ ID NO 65089

SEQ ID NO: 118904 - protein, 468 aa, Arabidopsis thaliana; identical to SEQ ID NO: 107665
  peptide (1)..(468): Ceres Seq. ID no. 13651181

SEQ ID NO: 118905 - protein, 453 aa, Arabidopsis thaliana; identical to SEQ ID NO: 87386
  peptide (1)..(453): Ceres Seq. ID no. 13651182

SEQ ID NO: 118906 - protein, 444 aa, Arabidopsis thaliana; identical to SEQ ID NO: 87387
  peptide (1)..(444): Ceres Seq. ID no. 13651183

SEQ ID NO: 118907 - DNA, 1011 bp, Arabidopsis thaliana; identical to SEQ ID NO: 107668
  misc_feature (1)..(1011): Ceres Seq. ID no. 13651188
  misc_feature (1)..(1011): Ortholog of  Ceres SEQ ID NO 14311392 as cited in SEQ ID NO 58307
  misc_feature (1)..(1011): Ortholog of  Ceres SEQ ID NO 13599348 as cited in SEQ ID NO 0

SEQ ID NO: 118908 - protein, 281 aa, Arabidopsis thaliana; identical to SEQ ID NO: 107669
  peptide (1)..(281): Ceres Seq. ID no. 13651189

SEQ ID NO: 118909 - protein, 246 aa, Arabidopsis thaliana; identical to SEQ ID NO: 107670
  peptide (1)..(246): Ceres Seq. ID no. 13651190

SEQ ID NO: 118910 - protein, 172 aa, Arabidopsis thaliana; identical to SEQ ID NO: 107671
  peptide (1)..(172): Ceres Seq. ID no. 13651191

SEQ ID NO: 118911 - DNA, 1396 bp, Arabidopsis thaliana; identical to SEQ ID NO: 107672
  misc_feature (1)..(1396): Ceres Seq. ID no. 13651192
  misc_feature (1)..(1396): Ortholog of  Ceres SEQ ID NO 15226389 as cited in SEQ ID NO 52992
  misc_feature (1)..(1396): Ortholog of  Ceres SEQ ID NO 14312152 as cited in SEQ ID NO 57197
  misc_feature (1)..(1396): Ortholog of  Ceres SEQ ID NO 13664395 as cited in SEQ ID NO 67508
  misc_feature (1)..(1396): Ortholog of  Ceres SEQ ID NO 13662335 as cited in SEQ ID NO 68440

SEQ ID NO: 118912 - protein, 425 aa, Arabidopsis thaliana; identical to SEQ ID NO: 107673
  peptide (1)..(425): Ceres Seq. ID no. 13651193

SEQ ID NO: 118913 - protein, 421 aa, Arabidopsis thaliana; identical to SEQ ID NO: 107674
  peptide (1)..(421): Ceres Seq. ID no. 13651194

SEQ ID NO: 118914 - protein, 395 aa, Arabidopsis thaliana; identical to SEQ ID NO: 107675
  peptide (1)..(395): Ceres Seq. ID no. 13651195

SEQ ID NO: 118915 - DNA, 2637 bp, Arabidopsis thaliana; identical to SEQ ID NO: 107676
  misc_feature (1)..(2637): Ceres Seq. ID no. 13651206
  misc_feature (1)..(2637): Ortholog of  Ceres SEQ ID NO 13600595 as cited in SEQ ID NO 629

SEQ ID NO: 118916 - protein, 820 aa, Arabidopsis thaliana; identical to SEQ ID NO: 107677
  peptide (1)..(820): Ceres Seq. ID no. 13651207

SEQ ID NO: 118917 - protein, 807 aa, Arabidopsis thaliana; identical to SEQ ID NO: 107678
  peptide (1)..(807): Ceres Seq. ID no. 13651208

SEQ ID NO: 118918 - protein, 766 aa, Arabidopsis thaliana; identical to SEQ ID NO: 107679
  peptide (1)..(766): Ceres Seq. ID no. 13651209

SEQ ID NO: 118919 - DNA, 899 bp, Arabidopsis thaliana; identical to SEQ ID NO: 107680
  misc_feature (1)..(899): Ceres Seq. ID no. 13651216
  misc_feature (1)..(899): Ortholog of  Ceres SEQ ID NO 12623816 as cited in SEQ ID NO 61298

SEQ ID NO: 118920 - protein, 262 aa, Arabidopsis thaliana; identical to SEQ ID NO: 107681
  peptide (1)..(262): Ceres Seq. ID no. 13651217

SEQ ID NO: 118921 - protein, 227 aa, Arabidopsis thaliana; identical to SEQ ID NO: 107682
  peptide (1)..(227): Ceres Seq. ID no. 13651218

SEQ ID NO: 118922 - protein, 215 aa, Arabidopsis thaliana; identical to SEQ ID NO: 70145
  peptide (1)..(215): Ceres Seq. ID no. 13651219

SEQ ID NO: 118923 - DNA, 2428 bp, Arabidopsis thaliana; identical to SEQ ID NO: 107684
  misc_feature (1)..(2428): Ceres Seq. ID no. 13651220
  misc_feature (1)..(2428): Ortholog of  Ceres SEQ ID NO 15169244 as cited in SEQ ID NO 58988

SEQ ID NO: 118924 - protein, 240 aa, Arabidopsis thaliana; identical to SEQ ID NO: 107685
  peptide (1)..(240): Ceres Seq. ID no. 13651221

SEQ ID NO: 118925 - protein, 155 aa, Arabidopsis thaliana; identical to SEQ ID NO: 107686
  peptide (1)..(155): Ceres Seq. ID no. 13651222

SEQ ID NO: 118926 - DNA, 1117 bp, Arabidopsis thaliana; identical to SEQ ID NO: 107687
  misc_feature (1)..(1117): Ceres Seq. ID no. 13651223
  misc_feature (1)..(1117): Ortholog of  Ceres SEQ ID NO 13593855 as cited in SEQ ID NO 53838
  misc_feature (1)..(1117): Ortholog of  Ceres SEQ ID NO 14302247 as cited in SEQ ID NO 62154
  misc_feature (1)..(1117): Ortholog of  Ceres SEQ ID NO 13539874 as cited in SEQ ID NO 64069

SEQ ID NO: 118927 - protein, 306 aa, Arabidopsis thaliana; identical to SEQ ID NO: 71121
  peptide (1)..(306): Ceres Seq. ID no. 13651224

SEQ ID NO: 118928 - protein, 286 aa, Arabidopsis thaliana; identical to SEQ ID NO: 71122
  peptide (1)..(286): Ceres Seq. ID no. 13651225

SEQ ID NO: 118929 - protein, 252 aa, Arabidopsis thaliana; identical to SEQ ID NO: 71123
  peptide (1)..(252): Ceres Seq. ID no. 13651226

SEQ ID NO: 118930 - DNA, 3117 bp, Arabidopsis thaliana; identical to SEQ ID NO: 107691
  misc_feature (1)..(3117): Ceres Seq. ID no. 13651272
  misc_feature (1)..(3117): Ortholog of  Ceres SEQ ID NO 15168378 as cited in SEQ ID NO 59129

SEQ ID NO: 118931 - protein, 971 aa, Arabidopsis thaliana; identical to SEQ ID NO: 107692
  peptide (1)..(971): Ceres Seq. ID no. 13651273

SEQ ID NO: 118932 - protein, 945 aa, Arabidopsis thaliana; identical to SEQ ID NO: 107693
  peptide (1)..(945): Ceres Seq. ID no. 13651274

SEQ ID NO: 118933 - protein, 928 aa, Arabidopsis thaliana; identical to SEQ ID NO: 107694
  peptide (1)..(928): Ceres Seq. ID no. 13651275

SEQ ID NO: 118934 - DNA, 3952 bp, Arabidopsis thaliana; identical to SEQ ID NO: 107695
  misc_feature (1)..(3952): Ceres Seq. ID no. 13651276
  misc_feature (1)..(3952): Ortholog of  Ceres SEQ ID NO 15180400 as cited in SEQ ID NO 0

SEQ ID NO: 118935 - protein, 1059 aa, Arabidopsis thaliana; identical to SEQ ID NO: 107696
  peptide (1)..(1059): Ceres Seq. ID no. 13651277

SEQ ID NO: 118936 - protein, 1048 aa, Arabidopsis thaliana; identical to SEQ ID NO: 107697
  peptide (1)..(1048): Ceres Seq. ID no. 13651278

SEQ ID NO: 118937 - protein, 899 aa, Arabidopsis thaliana; identical to SEQ ID NO: 107698
  peptide (1)..(899): Ceres Seq. ID no. 13651279

SEQ ID NO: 118938 - DNA, 1288 bp, Arabidopsis thaliana; identical to SEQ ID NO: 107699
  misc_feature (1)..(1288): Ceres Seq. ID no. 13651288
  misc_feature (1)..(1288): Ortholog of  Ceres SEQ ID NO 15176219 as cited in SEQ ID NO 58640
  misc_feature (1)..(1288): Ortholog of  Ceres SEQ ID NO 14303413 as cited in SEQ ID NO 59769

SEQ ID NO: 118939 - protein, 391 aa, Arabidopsis thaliana; identical to SEQ ID NO: 107700
  peptide (1)..(391): Ceres Seq. ID no. 13651289

SEQ ID NO: 118940 - protein, 381 aa, Arabidopsis thaliana; identical to SEQ ID NO: 107701
  peptide (1)..(381): Ceres Seq. ID no. 13651290

SEQ ID NO: 118941 - protein, 356 aa, Arabidopsis thaliana; identical to SEQ ID NO: 107702
  peptide (1)..(356): Ceres Seq. ID no. 13651291

SEQ ID NO: 118942 - DNA, 769 bp, Arabidopsis thaliana; identical to SEQ ID NO: 107703
  misc_feature (1)..(769): Ceres Seq. ID no. 13651302
  misc_feature (1)..(769): Ortholog of  Ceres SEQ ID NO 14306814 as cited in SEQ ID NO 56370
  misc_feature (1)..(769): Ortholog of  Ceres SEQ ID NO 13662830 as cited in SEQ ID NO 61566
  misc_feature (1)..(769): Ortholog of  Ceres SEQ ID NO 14309275 as cited in SEQ ID NO 0

SEQ ID NO: 118943 - protein, 134 aa, Arabidopsis thaliana; identical to SEQ ID NO: 107704
  peptide (1)..(134): Ceres Seq. ID no. 13651303

SEQ ID NO: 118944 - protein, 109 aa, Arabidopsis thaliana; identical to SEQ ID NO: 107705
  peptide (1)..(109): Ceres Seq. ID no. 13651304

SEQ ID NO: 118945 - DNA, 1700 bp, Arabidopsis thaliana; identical to SEQ ID NO: 107706
  misc_feature (1)..(1700): Ceres Seq. ID no. 13651312
  misc_feature (1)..(1700): Ortholog of  Ceres SEQ ID NO 15169439 as cited in SEQ ID NO 55062

SEQ ID NO: 118946 - protein, 494 aa, Arabidopsis thaliana; identical to SEQ ID NO: 79182
  peptide (1)..(494): Ceres Seq. ID no. 13651313

SEQ ID NO: 118947 - protein, 414 aa, Arabidopsis thaliana; identical to SEQ ID NO: 79183
  peptide (1)..(414): Ceres Seq. ID no. 13651314

SEQ ID NO: 118948 - protein, 397 aa, Arabidopsis thaliana; identical to SEQ ID NO: 79184
  peptide (1)..(397): Ceres Seq. ID no. 13651315

SEQ ID NO: 118949 - DNA, 1778 bp, Arabidopsis thaliana; identical to SEQ ID NO: 107710
  misc_feature (1)..(1778): Ceres Seq. ID no. 13651357
  misc_feature (1)..(1778): Ortholog of  Ceres SEQ ID NO 13594213 as cited in SEQ ID NO 57038
  misc_feature (1)..(1778): Ortholog of  Ceres SEQ ID NO 13654989 as cited in SEQ ID NO 63117
  misc_feature (1)..(1778): Ortholog of  Ceres SEQ ID NO 13584744 as cited in SEQ ID NO 69137

SEQ ID NO: 118950 - protein, 410 aa, Arabidopsis thaliana; identical to SEQ ID NO: 107711
  peptide (1)..(410): Ceres Seq. ID no. 13651358

SEQ ID NO: 118951 - protein, 259 aa, Arabidopsis thaliana; identical to SEQ ID NO: 107712
  peptide (1)..(259): Ceres Seq. ID no. 13651359

SEQ ID NO: 118952 - protein, 236 aa, Arabidopsis thaliana; identical to SEQ ID NO: 71405
  peptide (1)..(236): Ceres Seq. ID no. 13651360

SEQ ID NO: 118953 - DNA, 1725 bp, Arabidopsis thaliana; identical to SEQ ID NO: 107714
  misc_feature (1)..(1725): Ceres Seq. ID no. 13651361
  misc_feature (1)..(1725): Ortholog of  Ceres SEQ ID NO 13654989 as cited in SEQ ID NO 63117
  misc_feature (1)..(1725): Ortholog of  Ceres SEQ ID NO 13657138 as cited in SEQ ID NO 65923
  misc_feature (1)..(1725): Ortholog of  Ceres SEQ ID NO 13584744 as cited in SEQ ID NO 69137

SEQ ID NO: 118954 - protein, 518 aa, Arabidopsis thaliana; identical to SEQ ID NO: 107715
  peptide (1)..(518): Ceres Seq. ID no. 13651362

SEQ ID NO: 118955 - protein, 511 aa, Arabidopsis thaliana; identical to SEQ ID NO: 107716
  peptide (1)..(511): Ceres Seq. ID no. 13651363

SEQ ID NO: 118956 - protein, 380 aa, Arabidopsis thaliana; identical to SEQ ID NO: 107717
  peptide (1)..(380): Ceres Seq. ID no. 13651364

SEQ ID NO: 118957 - DNA, 3471 bp, Arabidopsis thaliana; identical to SEQ ID NO: 107718
  misc_feature (1)..(3471): Ceres Seq. ID no. 13651372
  misc_feature (1)..(3471): Ortholog of  Ceres SEQ ID NO 12586556 as cited in SEQ ID NO 64667
  misc_feature (1)..(3471): Ortholog of  Ceres SEQ ID NO 13660894 as cited in SEQ ID NO 67475

SEQ ID NO: 118958 - protein, 457 aa, Arabidopsis thaliana; identical to SEQ ID NO: 107719
  peptide (1)..(457): Ceres Seq. ID no. 13651373

SEQ ID NO: 118959 - protein, 446 aa, Arabidopsis thaliana; identical to SEQ ID NO: 107720
  peptide (1)..(446): Ceres Seq. ID no. 13651374

SEQ ID NO: 118960 - protein, 411 aa, Arabidopsis thaliana; identical to SEQ ID NO: 107721
  peptide (1)..(411): Ceres Seq. ID no. 13651375

SEQ ID NO: 118961 - DNA, 786 bp, Arabidopsis thaliana; identical to SEQ ID NO: 107722
  misc_feature (1)..(786): Ceres Seq. ID no. 13651376
  misc_feature (1)..(786): Ortholog of  Ceres SEQ ID NO 14310243 as cited in SEQ ID NO 20666

SEQ ID NO: 118962 - protein, 232 aa, Arabidopsis thaliana; identical to SEQ ID NO: 107723
  peptide (1)..(232): Ceres Seq. ID no. 13651377

SEQ ID NO: 118963 - protein, 200 aa, Arabidopsis thaliana; identical to SEQ ID NO: 97919
  peptide (1)..(200): Ceres Seq. ID no. 13651378

SEQ ID NO: 118964 - protein, 184 aa, Arabidopsis thaliana; identical to SEQ ID NO: 97920
  peptide (1)..(184): Ceres Seq. ID no. 13651379

SEQ ID NO: 118965 - DNA, 1641 bp, Arabidopsis thaliana; identical to SEQ ID NO: 107726
  misc_feature (1)..(1641): Ceres Seq. ID no. 13651387
  misc_feature (1)..(1641): Ortholog of  Ceres SEQ ID NO 15169045 as cited in SEQ ID NO 58372
  misc_feature (1)..(1641): Ortholog of  Ceres SEQ ID NO 13597361 as cited in SEQ ID NO 63638

SEQ ID NO: 118966 - protein, 450 aa, Arabidopsis thaliana; identical to SEQ ID NO: 107727
  peptide (1)..(450): Ceres Seq. ID no. 13651388

SEQ ID NO: 118967 - protein, 303 aa, Arabidopsis thaliana; identical to SEQ ID NO: 107728
  peptide (1)..(303): Ceres Seq. ID no. 13651389

SEQ ID NO: 118968 - protein, 261 aa, Arabidopsis thaliana; identical to SEQ ID NO: 107729
  peptide (1)..(261): Ceres Seq. ID no. 13651390

SEQ ID NO: 118969 - DNA, 2332 bp, Arabidopsis thaliana; identical to SEQ ID NO: 107730
  misc_feature (1)..(2332): Ceres Seq. ID no. 13651395
  misc_feature (1)..(2332): Ortholog of  Ceres SEQ ID NO 13654989 as cited in SEQ ID NO 63117
  misc_feature (1)..(2332): Ortholog of  Ceres SEQ ID NO 13584744 as cited in SEQ ID NO 69137

SEQ ID NO: 118970 - protein, 709 aa, Arabidopsis thaliana; identical to SEQ ID NO: 107731
  peptide (1)..(709): Ceres Seq. ID no. 13651396

SEQ ID NO: 118971 - protein, 680 aa, Arabidopsis thaliana; identical to SEQ ID NO: 107732
  peptide (1)..(680): Ceres Seq. ID no. 13651397

SEQ ID NO: 118972 - protein, 621 aa, Arabidopsis thaliana; identical to SEQ ID NO: 107733
  peptide (1)..(621): Ceres Seq. ID no. 13651398

SEQ ID NO: 118973 - DNA, 2046 bp, Arabidopsis thaliana; identical to SEQ ID NO: 107734
  misc_feature (1)..(2046): Ceres Seq. ID no. 13651427
  misc_feature (1)..(2046): Ortholog of  Ceres SEQ ID NO 15172539 as cited in SEQ ID NO 57333
  misc_feature (1)..(2046): Ortholog of  Ceres SEQ ID NO 14315951 as cited in SEQ ID NO 57634
  misc_feature (1)..(2046): Ortholog of  Ceres SEQ ID NO 13597324 as cited in SEQ ID NO 64842
  misc_feature (1)..(2046): Ortholog of  Ceres SEQ ID NO 13658672 as cited in SEQ ID NO 66627

SEQ ID NO: 118974 - protein, 178 aa, Arabidopsis thaliana; identical to SEQ ID NO: 82681
  peptide (1)..(178): Ceres Seq. ID no. 13651428

SEQ ID NO: 118975 - protein, 114 aa, Arabidopsis thaliana; identical to SEQ ID NO: 107736
  peptide (1)..(114): Ceres Seq. ID no. 13651429

SEQ ID NO: 118976 - protein, 108 aa, Arabidopsis thaliana; identical to SEQ ID NO: 107737
  peptide (1)..(108): Ceres Seq. ID no. 13651430

SEQ ID NO: 118977 - DNA, 1690 bp, Arabidopsis thaliana; identical to SEQ ID NO: 107738
  misc_feature (1)..(1690): Ceres Seq. ID no. 13651467
  misc_feature (1)..(1690): Ortholog of  Ceres SEQ ID NO 13502874 as cited in SEQ ID NO 66298
  misc_feature (1)..(1690): Ortholog of  Ceres SEQ ID NO 12614124 as cited in SEQ ID NO 68392

SEQ ID NO: 118978 - protein, 516 aa, Arabidopsis thaliana; identical to SEQ ID NO: 107739
  peptide (1)..(516): Ceres Seq. ID no. 13651468

SEQ ID NO: 118979 - protein, 445 aa, Arabidopsis thaliana; identical to SEQ ID NO: 107740
  peptide (1)..(445): Ceres Seq. ID no. 13651469

SEQ ID NO: 118980 - protein, 438 aa, Arabidopsis thaliana; identical to SEQ ID NO: 107741
  peptide (1)..(438): Ceres Seq. ID no. 13651470

SEQ ID NO: 118981 - DNA, 1792 bp, Arabidopsis thaliana; identical to SEQ ID NO: 107742
  misc_feature (1)..(1792): Ceres Seq. ID no. 13651479
  misc_feature (1)..(1792): Ortholog of  Ceres SEQ ID NO 12609146 as cited in SEQ ID NO 52118
  misc_feature (1)..(1792): Ortholog of  Ceres SEQ ID NO 13638136 as cited in SEQ ID NO 58644
  misc_feature (1)..(1792): Ortholog of  Ceres SEQ ID NO 13596868 as cited in SEQ ID NO 62806
  misc_feature (1)..(1792): Ortholog of  Ceres SEQ ID NO 12566239 as cited in SEQ ID NO 0
  misc_feature (1)..(1792): Ortholog of  Ceres SEQ ID NO 13599119 as cited in SEQ ID NO 0

SEQ ID NO: 118982 - protein, 249 aa, Arabidopsis thaliana; identical to SEQ ID NO: 107743
  peptide (1)..(249): Ceres Seq. ID no. 13651480

SEQ ID NO: 118983 - protein, 245 aa, Arabidopsis thaliana; identical to SEQ ID NO: 107744
  peptide (1)..(245): Ceres Seq. ID no. 13651481

SEQ ID NO: 118984 - protein, 241 aa, Arabidopsis thaliana; identical to SEQ ID NO: 107745
  peptide (1)..(241): Ceres Seq. ID no. 13651482

SEQ ID NO: 118985 - DNA, 1117 bp, Arabidopsis thaliana; identical to SEQ ID NO: 107746
  misc_feature (1)..(1117): Ceres Seq. ID no. 13651489
  misc_feature (1)..(1117): Ortholog of  Ceres SEQ ID NO 13597538 as cited in SEQ ID NO 64966

SEQ ID NO: 118986 - protein, 240 aa, Arabidopsis thaliana; identical to SEQ ID NO: 105314
  peptide (1)..(240): Ceres Seq. ID no. 13651490

SEQ ID NO: 118987 - protein, 213 aa, Arabidopsis thaliana; identical to SEQ ID NO: 105315
  peptide (1)..(213): Ceres Seq. ID no. 13651491

SEQ ID NO: 118988 - protein, 168 aa, Arabidopsis thaliana; identical to SEQ ID NO: 105316
  peptide (1)..(168): Ceres Seq. ID no. 13651492

SEQ ID NO: 118989 - DNA, 1254 bp, Arabidopsis thaliana; identical to SEQ ID NO: 107750
  misc_feature (1)..(1254): Ceres Seq. ID no. 13651497
  misc_feature (1)..(1254): Ortholog of  Ceres SEQ ID NO 14312866 as cited in SEQ ID NO 55630
  misc_feature (1)..(1254): Ortholog of  Ceres SEQ ID NO 13597376 as cited in SEQ ID NO 64002
  misc_feature (1)..(1254): Ortholog of  Ceres SEQ ID NO 13503573 as cited in SEQ ID NO 65402
  misc_feature (1)..(1254): Ortholog of  Ceres SEQ ID NO 13659615 as cited in SEQ ID NO 67248

SEQ ID NO: 118990 - protein, 351 aa, Arabidopsis thaliana; identical to SEQ ID NO: 102703
  peptide (1)..(351): Ceres Seq. ID no. 13651498

SEQ ID NO: 118991 - protein, 231 aa, Arabidopsis thaliana; identical to SEQ ID NO: 102704
  peptide (1)..(231): Ceres Seq. ID no. 13651499

SEQ ID NO: 118992 - protein, 224 aa, Arabidopsis thaliana; identical to SEQ ID NO: 102705
  peptide (1)..(224): Ceres Seq. ID no. 13651500

SEQ ID NO: 118993 - DNA, 1686 bp, Arabidopsis thaliana; identical to SEQ ID NO: 107754
  misc_feature (1)..(1686): Ceres Seq. ID no. 13651507
  misc_feature (1)..(1686): Ortholog of  Ceres SEQ ID NO 13502874 as cited in SEQ ID NO 66298
  misc_feature (1)..(1686): Ortholog of  Ceres SEQ ID NO 12614124 as cited in SEQ ID NO 68392

SEQ ID NO: 118994 - protein, 378 aa, Arabidopsis thaliana; identical to SEQ ID NO: 107755
  peptide (1)..(378): Ceres Seq. ID no. 13651508

SEQ ID NO: 118995 - protein, 319 aa, Arabidopsis thaliana; identical to SEQ ID NO: 107756
  peptide (1)..(319): Ceres Seq. ID no. 13651509

SEQ ID NO: 118996 - protein, 266 aa, Arabidopsis thaliana; identical to SEQ ID NO: 107757
  peptide (1)..(266): Ceres Seq. ID no. 13651510

SEQ ID NO: 118997 - DNA, 2024 bp, Arabidopsis thaliana; identical to SEQ ID NO: 107758
  misc_feature (1)..(2024): Ceres Seq. ID no. 13651521
  misc_feature (1)..(2024): Ortholog of  Ceres SEQ ID NO 13654989 as cited in SEQ ID NO 63117

SEQ ID NO: 118998 - protein, 626 aa, Arabidopsis thaliana; identical to SEQ ID NO: 107759
  peptide (1)..(626): Ceres Seq. ID no. 13651522

SEQ ID NO: 118999 - protein, 620 aa, Arabidopsis thaliana; identical to SEQ ID NO: 107760
  peptide (1)..(620): Ceres Seq. ID no. 13651523

SEQ ID NO: 119000 - protein, 470 aa, Arabidopsis thaliana; identical to SEQ ID NO: 107761
  peptide (1)..(470): Ceres Seq. ID no. 13651524

SEQ ID NO: 119001 - DNA, 1814 bp, Arabidopsis thaliana; identical to SEQ ID NO: 107762
  misc_feature (1)..(1814): Ceres Seq. ID no. 13651541
  misc_feature (1)..(1814): Ortholog of  Ceres SEQ ID NO 13648124 as cited in SEQ ID NO 20362

SEQ ID NO: 119002 - protein, 490 aa, Arabidopsis thaliana; identical to SEQ ID NO: 107763
  peptide (1)..(490): Ceres Seq. ID no. 13651542

SEQ ID NO: 119003 - protein, 406 aa, Arabidopsis thaliana; identical to SEQ ID NO: 107764
  peptide (1)..(406): Ceres Seq. ID no. 13651543

SEQ ID NO: 119004 - protein, 400 aa, Arabidopsis thaliana; identical to SEQ ID NO: 107765
  peptide (1)..(400): Ceres Seq. ID no. 13651544

SEQ ID NO: 119005 - DNA, 1090 bp, Arabidopsis thaliana; identical to SEQ ID NO: 107766
  misc_feature (1)..(1090): Ceres Seq. ID no. 13651582
  misc_feature (1)..(1090): Ortholog of  Ceres SEQ ID NO 13658400 as cited in SEQ ID NO 66403

SEQ ID NO: 119006 - protein, 255 aa, Arabidopsis thaliana; identical to SEQ ID NO: 107767
  peptide (1)..(255): Ceres Seq. ID no. 13651583

SEQ ID NO: 119007 - protein, 224 aa, Arabidopsis thaliana; identical to SEQ ID NO: 107768
  peptide (1)..(224): Ceres Seq. ID no. 13651584

SEQ ID NO: 119008 - protein, 198 aa, Arabidopsis thaliana; identical to SEQ ID NO: 88848
  peptide (1)..(198): Ceres Seq. ID no. 13651585

SEQ ID NO: 119009 - DNA, 738 bp, Arabidopsis thaliana; identical to SEQ ID NO: 107770
  misc_feature (1)..(738): Ceres Seq. ID no. 13651590
  misc_feature (1)..(738): Ortholog of  Ceres SEQ ID NO 15172974 as cited in SEQ ID NO 67643

SEQ ID NO: 119010 - protein, 167 aa, Arabidopsis thaliana; identical to SEQ ID NO: 107771
  peptide (1)..(167): Ceres Seq. ID no. 13651591

SEQ ID NO: 119011 - DNA, 966 bp, Arabidopsis thaliana; identical to SEQ ID NO: 107772
  misc_feature (1)..(966): Ceres Seq. ID no. 13651592
  misc_feature (1)..(966): Ortholog of  Ceres SEQ ID NO 14313522 as cited in SEQ ID NO 63547
  misc_feature (1)..(966): Ortholog of  Ceres SEQ ID NO 13597471 as cited in SEQ ID NO 65101

SEQ ID NO: 119012 - protein, 231 aa, Arabidopsis thaliana; identical to SEQ ID NO: 107773
  peptide (1)..(231): Ceres Seq. ID no. 13651593

SEQ ID NO: 119013 - DNA, 1079 bp, Arabidopsis thaliana; identical to SEQ ID NO: 107774
  misc_feature (1)..(1079): Ceres Seq. ID no. 13651594
  misc_feature (1)..(1079): Ortholog of  Ceres SEQ ID NO 15178717 as cited in SEQ ID NO 54457
  misc_feature (1)..(1079): Ortholog of  Ceres SEQ ID NO 13584012 as cited in SEQ ID NO 63469

SEQ ID NO: 119014 - protein, 256 aa, Arabidopsis thaliana; identical to SEQ ID NO: 107775
  peptide (1)..(256): Ceres Seq. ID no. 13651595

SEQ ID NO: 119015 - protein, 189 aa, Arabidopsis thaliana; identical to SEQ ID NO: 107776
  peptide (1)..(189): Ceres Seq. ID no. 13651596

SEQ ID NO: 119016 - protein, 187 aa, Arabidopsis thaliana; identical to SEQ ID NO: 107777
  peptide (1)..(187): Ceres Seq. ID no. 13651597

SEQ ID NO: 119017 - DNA, 1337 bp, Arabidopsis thaliana; identical to SEQ ID NO: 107778
  misc_feature (1)..(1337): Ceres Seq. ID no. 13651632
  misc_feature (1)..(1337): Ortholog of  Ceres SEQ ID NO 15169415 as cited in SEQ ID NO 59010
  misc_feature (1)..(1337): Ortholog of  Ceres SEQ ID NO 13656546 as cited in SEQ ID NO 65729

SEQ ID NO: 119018 - protein, 388 aa, Arabidopsis thaliana; identical to SEQ ID NO: 90399
  peptide (1)..(388): Ceres Seq. ID no. 13651633

SEQ ID NO: 119019 - protein, 381 aa, Arabidopsis thaliana; identical to SEQ ID NO: 90400
  peptide (1)..(381): Ceres Seq. ID no. 13651634

SEQ ID NO: 119020 - protein, 345 aa, Arabidopsis thaliana; identical to SEQ ID NO: 90401
  peptide (1)..(345): Ceres Seq. ID no. 13651635

SEQ ID NO: 119021 - DNA, 1121 bp, Arabidopsis thaliana; identical to SEQ ID NO: 107782
  misc_feature (1)..(1121): Ceres Seq. ID no. 13651636
  misc_feature (1)..(1121): Ortholog of  Ceres SEQ ID NO 14304842 as cited in SEQ ID NO 54198
  misc_feature (1)..(1121): Ortholog of  Ceres SEQ ID NO 14308683 as cited in SEQ ID NO 58723

SEQ ID NO: 119022 - protein, 181 aa, Arabidopsis thaliana; identical to SEQ ID NO: 107783
  peptide (1)..(181): Ceres Seq. ID no. 13651637

SEQ ID NO: 119023 - protein, 167 aa, Arabidopsis thaliana; identical to SEQ ID NO: 107784
  peptide (1)..(167): Ceres Seq. ID no. 13651638

SEQ ID NO: 119024 - protein, 114 aa, Arabidopsis thaliana; identical to SEQ ID NO: 107785
  peptide (1)..(114): Ceres Seq. ID no. 13651639

SEQ ID NO: 119025 - DNA, 1232 bp, Arabidopsis thaliana; identical to SEQ ID NO: 107786
  misc_feature (1)..(1232): Ceres Seq. ID no. 13651640
  misc_feature (1)..(1232): Ortholog of  Ceres SEQ ID NO 13598935 as cited in SEQ ID NO 1239
  misc_feature (1)..(1232): Ortholog of  Ceres SEQ ID NO 13598171 as cited in SEQ ID NO 61357
  misc_feature (1)..(1232): Ortholog of  Ceres SEQ ID NO 13664149 as cited in SEQ ID NO 61490

SEQ ID NO: 119026 - protein, 160 aa, Arabidopsis thaliana; identical to SEQ ID NO: 107787
  peptide (1)..(160): Ceres Seq. ID no. 13651641

SEQ ID NO: 119027 - protein, 110 aa, Arabidopsis thaliana; identical to SEQ ID NO: 107788
  peptide (1)..(110): Ceres Seq. ID no. 13651642

SEQ ID NO: 119028 - protein, 101 aa, Arabidopsis thaliana; identical to SEQ ID NO: 107789
  peptide (1)..(101): Ceres Seq. ID no. 13651643

SEQ ID NO: 119029 - DNA, 1186 bp, Arabidopsis thaliana; identical to SEQ ID NO: 107790
  misc_feature (1)..(1186): Ceres Seq. ID no. 13651646
  misc_feature (1)..(1186): Ortholog of  Ceres SEQ ID NO 13655640 as cited in SEQ ID NO 63844
  misc_feature (1)..(1186): Ortholog of  Ceres SEQ ID NO 13584744 as cited in SEQ ID NO 69137

SEQ ID NO: 119030 - protein, 358 aa, Arabidopsis thaliana; identical to SEQ ID NO: 107791
  peptide (1)..(358): Ceres Seq. ID no. 13651647

SEQ ID NO: 119031 - protein, 351 aa, Arabidopsis thaliana; identical to SEQ ID NO: 107792
  peptide (1)..(351): Ceres Seq. ID no. 13651648

SEQ ID NO: 119032 - protein, 239 aa, Arabidopsis thaliana; identical to SEQ ID NO: 69755
  peptide (1)..(239): Ceres Seq. ID no. 13651649

SEQ ID NO: 119033 - DNA, 498 bp, Arabidopsis thaliana; identical to SEQ ID NO: 107794
  misc_feature (1)..(498): Ceres Seq. ID no. 13651662
  misc_feature (1)..(498): Ortholog of  Ceres SEQ ID NO 12635836 as cited in SEQ ID NO 0
  misc_feature (1)..(498): Ortholog of  Ceres SEQ ID NO 13599004 as cited in SEQ ID NO 0

SEQ ID NO: 119034 - protein, 78 aa, Arabidopsis thaliana; identical to SEQ ID NO: 35309
  peptide (1)..(78): Ceres Seq. ID no. 13651663

SEQ ID NO: 119035 - protein, 41 aa, Arabidopsis thaliana; identical to SEQ ID NO: 35310
  peptide (1)..(41): Ceres Seq. ID no. 13651664

SEQ ID NO: 119036 - DNA, 743 bp, Arabidopsis thaliana; identical to SEQ ID NO: 107797
  misc_feature (1)..(743): Ceres Seq. ID no. 13651677
  misc_feature (1)..(743): Ortholog of  Ceres SEQ ID NO 14309686 as cited in SEQ ID NO 58523

SEQ ID NO: 119037 - protein, 146 aa, Arabidopsis thaliana; identical to SEQ ID NO: 29677
  peptide (1)..(146): Ceres Seq. ID no. 13651678

SEQ ID NO: 119038 - protein, 136 aa, Arabidopsis thaliana; identical to SEQ ID NO: 29678
  peptide (1)..(136): Ceres Seq. ID no. 13651679

SEQ ID NO: 119039 - protein, 75 aa, Arabidopsis thaliana; identical to SEQ ID NO: 29679
  peptide (1)..(75): Ceres Seq. ID no. 13651680

SEQ ID NO: 119040 - DNA, 1113 bp, Arabidopsis thaliana; identical to SEQ ID NO: 107801
  misc_feature (1)..(1113): Ceres Seq. ID no. 13651692
  misc_feature (1)..(1113): Ortholog of  Ceres SEQ ID NO 15174694 as cited in SEQ ID NO 54754
  misc_feature (1)..(1113): Ortholog of  Ceres SEQ ID NO 15175666 as cited in SEQ ID NO 54985
  misc_feature (1)..(1113): Ortholog of  Ceres SEQ ID NO 12388689 as cited in SEQ ID NO 0

SEQ ID NO: 119041 - protein, 334 aa, Arabidopsis thaliana; identical to SEQ ID NO: 107802
  peptide (1)..(334): Ceres Seq. ID no. 13651693

SEQ ID NO: 119042 - protein, 329 aa, Arabidopsis thaliana; identical to SEQ ID NO: 107803
  peptide (1)..(329): Ceres Seq. ID no. 13651694

SEQ ID NO: 119043 - protein, 256 aa, Arabidopsis thaliana; identical to SEQ ID NO: 107804
  peptide (1)..(256): Ceres Seq. ID no. 13651695

SEQ ID NO: 119044 - DNA, 1034 bp, Arabidopsis thaliana; identical to SEQ ID NO: 107805
  misc_feature (1)..(1034): Ceres Seq. ID no. 13651696
  misc_feature (1)..(1034): Ortholog of  Ceres SEQ ID NO 15225623 as cited in SEQ ID NO 64319

SEQ ID NO: 119045 - protein, 230 aa, Arabidopsis thaliana; identical to SEQ ID NO: 107806
  peptide (1)..(230): Ceres Seq. ID no. 13651697

SEQ ID NO: 119046 - protein, 215 aa, Arabidopsis thaliana; identical to SEQ ID NO: 49080
  peptide (1)..(215): Ceres Seq. ID no. 13651698

SEQ ID NO: 119047 - protein, 196 aa, Arabidopsis thaliana; identical to SEQ ID NO: 49081
  peptide (1)..(196): Ceres Seq. ID no. 13651699

SEQ ID NO: 119048 - DNA, 950 bp, Arabidopsis thaliana; identical to SEQ ID NO: 107809
  misc_feature (1)..(950): Ceres Seq. ID no. 13651741
  misc_feature (1)..(950): Ortholog of  Ceres SEQ ID NO 14311590 as cited in SEQ ID NO 51709

SEQ ID NO: 119049 - protein, 227 aa, Arabidopsis thaliana; identical to SEQ ID NO: 107810
  peptide (1)..(227): Ceres Seq. ID no. 13651742

SEQ ID NO: 119050 - protein, 188 aa, Arabidopsis thaliana; identical to SEQ ID NO: 107811
  peptide (1)..(188): Ceres Seq. ID no. 13651743

SEQ ID NO: 119051 - DNA, 1770 bp, Arabidopsis thaliana; identical to SEQ ID NO: 107812
  misc_feature (1)..(1770): Ceres Seq. ID no. 13651747
  misc_feature (1)..(1770): Ortholog of  Ceres SEQ ID NO 13654989 as cited in SEQ ID NO 63117
  misc_feature (1)..(1770): Ortholog of  Ceres SEQ ID NO 13584744 as cited in SEQ ID NO 69137

SEQ ID NO: 119052 - protein, 410 aa, Arabidopsis thaliana; identical to SEQ ID NO: 38356
  peptide (1)..(410): Ceres Seq. ID no. 13651748

SEQ ID NO: 119053 - protein, 238 aa, Arabidopsis thaliana; identical to SEQ ID NO: 38357
  peptide (1)..(238): Ceres Seq. ID no. 13651749

SEQ ID NO: 119054 - protein, 212 aa, Arabidopsis thaliana; identical to SEQ ID NO: 38358
  peptide (1)..(212): Ceres Seq. ID no. 13651750

SEQ ID NO: 119055 - DNA, 497 bp, Arabidopsis thaliana; identical to SEQ ID NO: 107816
  misc_feature (1)..(497): Ceres Seq. ID no. 13651751
  misc_feature (1)..(497): Ortholog of  Ceres SEQ ID NO 13648206 as cited in SEQ ID NO 20374

SEQ ID NO: 119056 - protein, 78 aa, Arabidopsis thaliana; identical to SEQ ID NO: 107817
  peptide (1)..(78): Ceres Seq. ID no. 13651752

SEQ ID NO: 119057 - protein, 72 aa, Arabidopsis thaliana; identical to SEQ ID NO: 107818
  peptide (1)..(72): Ceres Seq. ID no. 13651753

SEQ ID NO: 119058 - protein, 40 aa, Arabidopsis thaliana; identical to SEQ ID NO: 107819
  peptide (1)..(40): Ceres Seq. ID no. 13651754

SEQ ID NO: 119059 - DNA, 1372 bp, Arabidopsis thaliana; identical to SEQ ID NO: 107820
  misc_feature (1)..(1372): Ceres Seq. ID no. 13651774
  misc_feature (1)..(1372): Ortholog of  Ceres SEQ ID NO 13590671 as cited in SEQ ID NO 68208

SEQ ID NO: 119060 - protein, 402 aa, Arabidopsis thaliana; identical to SEQ ID NO: 107821
  peptide (1)..(402): Ceres Seq. ID no. 13651775

SEQ ID NO: 119061 - protein, 386 aa, Arabidopsis thaliana; identical to SEQ ID NO: 107822
  peptide (1)..(386): Ceres Seq. ID no. 13651776

SEQ ID NO: 119062 - protein, 238 aa, Arabidopsis thaliana; identical to SEQ ID NO: 107823
  peptide (1)..(238): Ceres Seq. ID no. 13651777

SEQ ID NO: 119063 - DNA, 1185 bp, Arabidopsis thaliana; identical to SEQ ID NO: 107824
  misc_feature (1)..(1185): Ceres Seq. ID no. 13651801
  misc_feature (1)..(1185): Ortholog of  Ceres SEQ ID NO 13596601 as cited in SEQ ID NO 62486

SEQ ID NO: 119064 - protein, 291 aa, Arabidopsis thaliana; identical to SEQ ID NO: 107825
  peptide (1)..(291): Ceres Seq. ID no. 13651802

SEQ ID NO: 119065 - protein, 285 aa, Arabidopsis thaliana; identical to SEQ ID NO: 107826
  peptide (1)..(285): Ceres Seq. ID no. 13651803

SEQ ID NO: 119066 - protein, 262 aa, Arabidopsis thaliana; identical to SEQ ID NO: 107827
  peptide (1)..(262): Ceres Seq. ID no. 13651804

SEQ ID NO: 119067 - DNA, 2095 bp, Arabidopsis thaliana; identical to SEQ ID NO: 107828
  misc_feature (1)..(2095): Ceres Seq. ID no. 13651809
  misc_feature (1)..(2095): Ortholog of  Ceres SEQ ID NO 13586013 as cited in SEQ ID NO 1182

SEQ ID NO: 119068 - protein, 673 aa, Arabidopsis thaliana; identical to SEQ ID NO: 107829
  peptide (1)..(673): Ceres Seq. ID no. 13651810

SEQ ID NO: 119069 - protein, 661 aa, Arabidopsis thaliana; identical to SEQ ID NO: 107830
  peptide (1)..(661): Ceres Seq. ID no. 13651811

SEQ ID NO: 119070 - protein, 621 aa, Arabidopsis thaliana; identical to SEQ ID NO: 90068
  peptide (1)..(621): Ceres Seq. ID no. 13651812

SEQ ID NO: 119071 - DNA, 2097 bp, Arabidopsis thaliana; identical to SEQ ID NO: 107832
  misc_feature (1)..(2097): Ceres Seq. ID no. 13651817
  misc_feature (1)..(2097): Ortholog of  Ceres SEQ ID NO 13596319 as cited in SEQ ID NO 67933

SEQ ID NO: 119072 - protein, 609 aa, Arabidopsis thaliana; identical to SEQ ID NO: 107833
  peptide (1)..(609): Ceres Seq. ID no. 13651818

SEQ ID NO: 119073 - protein, 471 aa, Arabidopsis thaliana; identical to SEQ ID NO: 107834
  peptide (1)..(471): Ceres Seq. ID no. 13651819

SEQ ID NO: 119074 - protein, 410 aa, Arabidopsis thaliana; identical to SEQ ID NO: 107835
  peptide (1)..(410): Ceres Seq. ID no. 13651820

SEQ ID NO: 119075 - DNA, 803 bp, Arabidopsis thaliana; identical to SEQ ID NO: 107836
  misc_feature (1)..(803): Ceres Seq. ID no. 13651839
  misc_feature (1)..(803): Ortholog of  Ceres SEQ ID NO 15171426 as cited in SEQ ID NO 51543
  misc_feature (1)..(803): Ortholog of  Ceres SEQ ID NO 14311780 as cited in SEQ ID NO 59241
  misc_feature (1)..(803): Ortholog of  Ceres SEQ ID NO 13584630 as cited in SEQ ID NO 65282

SEQ ID NO: 119076 - protein, 173 aa, Arabidopsis thaliana; identical to SEQ ID NO: 107837
  peptide (1)..(173): Ceres Seq. ID no. 13651840

SEQ ID NO: 119077 - protein, 156 aa, Arabidopsis thaliana; identical to SEQ ID NO: 107838
  peptide (1)..(156): Ceres Seq. ID no. 13651841

SEQ ID NO: 119078 - protein, 135 aa, Arabidopsis thaliana; identical to SEQ ID NO: 107839
  peptide (1)..(135): Ceres Seq. ID no. 13651842

SEQ ID NO: 119079 - DNA, 1691 bp, Arabidopsis thaliana; identical to SEQ ID NO: 107840
  misc_feature (1)..(1691): Ceres Seq. ID no. 13651850
  misc_feature (1)..(1691): Ortholog of  Ceres SEQ ID NO 13594209 as cited in SEQ ID NO 59089
  misc_feature (1)..(1691): Ortholog of  Ceres SEQ ID NO 13502874 as cited in SEQ ID NO 66298
  misc_feature (1)..(1691): Ortholog of  Ceres SEQ ID NO 12614124 as cited in SEQ ID NO 68392

SEQ ID NO: 119080 - protein, 308 aa, Arabidopsis thaliana; identical to SEQ ID NO: 107841
  peptide (1)..(308): Ceres Seq. ID no. 13651851

SEQ ID NO: 119081 - protein, 302 aa, Arabidopsis thaliana; identical to SEQ ID NO: 107842
  peptide (1)..(302): Ceres Seq. ID no. 13651852

SEQ ID NO: 119082 - protein, 183 aa, Arabidopsis thaliana; identical to SEQ ID NO: 107843
  peptide (1)..(183): Ceres Seq. ID no. 13651853

SEQ ID NO: 119083 - DNA, 4253 bp, Arabidopsis thaliana; identical to SEQ ID NO: 107844
  misc_feature (1)..(4253): Ceres Seq. ID no. 13651857
  misc_feature (1)..(4253): Ortholog of  Ceres SEQ ID NO 14304811 as cited in SEQ ID NO 53097

SEQ ID NO: 119084 - protein, 1296 aa, Arabidopsis thaliana; identical to SEQ ID NO: 107845
  peptide (1)..(1296): Ceres Seq. ID no. 13651858

SEQ ID NO: 119085 - protein, 1176 aa, Arabidopsis thaliana; identical to SEQ ID NO: 107846
  peptide (1)..(1176): Ceres Seq. ID no. 13651859

SEQ ID NO: 119086 - protein, 1140 aa, Arabidopsis thaliana; identical to SEQ ID NO: 107847
  peptide (1)..(1140): Ceres Seq. ID no. 13651860

SEQ ID NO: 119087 - DNA, 1264 bp, Arabidopsis thaliana; identical to SEQ ID NO: 107848
  misc_feature (1)..(1264): Ceres Seq. ID no. 13651869
  misc_feature (1)..(1264): Ortholog of  Ceres SEQ ID NO 12615365 as cited in SEQ ID NO 63027
  misc_feature (1)..(1264): Ortholog of  Ceres SEQ ID NO 12783179 as cited in SEQ ID NO 0

SEQ ID NO: 119088 - protein, 288 aa, Arabidopsis thaliana; identical to SEQ ID NO: 107849
  peptide (1)..(288): Ceres Seq. ID no. 13651870

SEQ ID NO: 119089 - protein, 245 aa, Arabidopsis thaliana; identical to SEQ ID NO: 107850
  peptide (1)..(245): Ceres Seq. ID no. 13651871

SEQ ID NO: 119090 - protein, 225 aa, Arabidopsis thaliana; identical to SEQ ID NO: 107851
  peptide (1)..(225): Ceres Seq. ID no. 13651872

SEQ ID NO: 119091 - DNA, 1621 bp, Arabidopsis thaliana; identical to SEQ ID NO: 107852
  misc_feature (1)..(1621): Ceres Seq. ID no. 13651873
  misc_feature (1)..(1621): Ortholog of  Ceres SEQ ID NO 13590780 as cited in SEQ ID NO 68149
  misc_feature (1)..(1621): Ortholog of  Ceres SEQ ID NO 13599756 as cited in SEQ ID NO 0

SEQ ID NO: 119092 - protein, 285 aa, Arabidopsis thaliana; identical to SEQ ID NO: 107853
  peptide (1)..(285): Ceres Seq. ID no. 13651874

SEQ ID NO: 119093 - protein, 267 aa, Arabidopsis thaliana; identical to SEQ ID NO: 107854
  peptide (1)..(267): Ceres Seq. ID no. 13651875

SEQ ID NO: 119094 - protein, 209 aa, Arabidopsis thaliana; identical to SEQ ID NO: 107855
  peptide (1)..(209): Ceres Seq. ID no. 13651876

SEQ ID NO: 119095 - DNA, 1282 bp, Arabidopsis thaliana; identical to SEQ ID NO: 107856
  misc_feature (1)..(1282): Ceres Seq. ID no. 13651897
  misc_feature (1)..(1282): Ortholog of  Ceres SEQ ID NO 13592961 as cited in SEQ ID NO 20522
  misc_feature (1)..(1282): Ortholog of  Ceres SEQ ID NO 12583469 as cited in SEQ ID NO 51031
  misc_feature (1)..(1282): Ortholog of  Ceres SEQ ID NO 13595998 as cited in SEQ ID NO 68161

SEQ ID NO: 119096 - protein, 249 aa, Arabidopsis thaliana; identical to SEQ ID NO: 107857
  peptide (1)..(249): Ceres Seq. ID no. 13651898

SEQ ID NO: 119097 - protein, 245 aa, Arabidopsis thaliana; identical to SEQ ID NO: 107858
  peptide (1)..(245): Ceres Seq. ID no. 13651899

SEQ ID NO: 119098 - DNA, 1750 bp, Arabidopsis thaliana; identical to SEQ ID NO: 107859
  misc_feature (1)..(1750): Ceres Seq. ID no. 13651904
  misc_feature (1)..(1750): Ortholog of  Ceres SEQ ID NO 14304094 as cited in SEQ ID NO 53422

SEQ ID NO: 119099 - protein, 487 aa, Arabidopsis thaliana; identical to SEQ ID NO: 107860
  peptide (1)..(487): Ceres Seq. ID no. 13651905

SEQ ID NO: 119100 - protein, 423 aa, Arabidopsis thaliana; identical to SEQ ID NO: 70404
  peptide (1)..(423): Ceres Seq. ID no. 13651906

SEQ ID NO: 119101 - protein, 403 aa, Arabidopsis thaliana; identical to SEQ ID NO: 70405
  peptide (1)..(403): Ceres Seq. ID no. 13651907

SEQ ID NO: 119102 - DNA, 1211 bp, Arabidopsis thaliana; identical to SEQ ID NO: 107863
  misc_feature (1)..(1211): Ceres Seq. ID no. 13651958
  misc_feature (1)..(1211): Ortholog of  Ceres SEQ ID NO 13595658 as cited in SEQ ID NO 59888
  misc_feature (1)..(1211): Ortholog of  Ceres SEQ ID NO 13661330 as cited in SEQ ID NO 61614
  misc_feature (1)..(1211): Ortholog of  Ceres SEQ ID NO 13596025 as cited in SEQ ID NO 62024
  misc_feature (1)..(1211): Ortholog of  Ceres SEQ ID NO 13662324 as cited in SEQ ID NO 62162
  misc_feature (1)..(1211): Ortholog of  Ceres SEQ ID NO 12625713 as cited in SEQ ID NO 64160
  misc_feature (1)..(1211): Ortholog of  Ceres SEQ ID NO 14303564 as cited in SEQ ID NO 65360
  misc_feature (1)..(1211): Ortholog of  Ceres SEQ ID NO 15170103 as cited in SEQ ID NO 66345
  misc_feature (1)..(1211): Ortholog of  Ceres SEQ ID NO 14313495 as cited in SEQ ID NO 0

SEQ ID NO: 119103 - protein, 322 aa, Arabidopsis thaliana; identical to SEQ ID NO: 107864
  peptide (1)..(322): Ceres Seq. ID no. 13651959

SEQ ID NO: 119104 - protein, 281 aa, Arabidopsis thaliana; identical to SEQ ID NO: 74372
  peptide (1)..(281): Ceres Seq. ID no. 13651960

SEQ ID NO: 119105 - protein, 280 aa, Arabidopsis thaliana; identical to SEQ ID NO: 74373
  peptide (1)..(280): Ceres Seq. ID no. 13651961

SEQ ID NO: 119106 - DNA, 1405 bp, Arabidopsis thaliana; identical to SEQ ID NO: 107867
  misc_feature (1)..(1405): Ceres Seq. ID no. 13651977
  misc_feature (1)..(1405): Ortholog of  Ceres SEQ ID NO 14302216 as cited in SEQ ID NO 66456

SEQ ID NO: 119107 - protein, 326 aa, Arabidopsis thaliana; identical to SEQ ID NO: 97985
  peptide (1)..(326): Ceres Seq. ID no. 13651978

SEQ ID NO: 119108 - protein, 320 aa, Arabidopsis thaliana; identical to SEQ ID NO: 97986
  peptide (1)..(320): Ceres Seq. ID no. 13651979

SEQ ID NO: 119109 - protein, 267 aa, Arabidopsis thaliana; identical to SEQ ID NO: 97987
  peptide (1)..(267): Ceres Seq. ID no. 13651980

SEQ ID NO: 119110 - DNA, 1728 bp, Arabidopsis thaliana; identical to SEQ ID NO: 107871
  misc_feature (1)..(1728): Ceres Seq. ID no. 13651997
  misc_feature (1)..(1728): Ortholog of  Ceres SEQ ID NO 13596816 as cited in SEQ ID NO 62287

SEQ ID NO: 119111 - protein, 491 aa, Arabidopsis thaliana; identical to SEQ ID NO: 107872
  peptide (1)..(491): Ceres Seq. ID no. 13651998

SEQ ID NO: 119112 - protein, 475 aa, Arabidopsis thaliana; identical to SEQ ID NO: 46855
  peptide (1)..(475): Ceres Seq. ID no. 13651999

SEQ ID NO: 119113 - protein, 439 aa, Arabidopsis thaliana; identical to SEQ ID NO: 46856
  peptide (1)..(439): Ceres Seq. ID no. 13652000

SEQ ID NO: 119114 - DNA, 1386 bp, Arabidopsis thaliana; identical to SEQ ID NO: 107875
  misc_feature (1)..(1386): Ceres Seq. ID no. 13652044
  misc_feature (1)..(1386): Ortholog of  Ceres SEQ ID NO 13595351 as cited in SEQ ID NO 55934
  misc_feature (1)..(1386): Ortholog of  Ceres SEQ ID NO 13639645 as cited in SEQ ID NO 57488

SEQ ID NO: 119115 - protein, 343 aa, Arabidopsis thaliana; identical to SEQ ID NO: 107876
  peptide (1)..(343): Ceres Seq. ID no. 13652045

SEQ ID NO: 119116 - protein, 333 aa, Arabidopsis thaliana; identical to SEQ ID NO: 107877
  peptide (1)..(333): Ceres Seq. ID no. 13652046

SEQ ID NO: 119117 - protein, 325 aa, Arabidopsis thaliana; identical to SEQ ID NO: 107878
  peptide (1)..(325): Ceres Seq. ID no. 13652047

SEQ ID NO: 119118 - DNA, 3062 bp, Arabidopsis thaliana; identical to SEQ ID NO: 107879
  misc_feature (1)..(3062): Ceres Seq. ID no. 13652071
  misc_feature (1)..(3062): Ortholog of  Ceres SEQ ID NO 12584310 as cited in SEQ ID NO 67945

SEQ ID NO: 119119 - protein, 867 aa, Arabidopsis thaliana; identical to SEQ ID NO: 99634
  peptide (1)..(867): Ceres Seq. ID no. 13652072

SEQ ID NO: 119120 - protein, 813 aa, Arabidopsis thaliana; identical to SEQ ID NO: 99635
  peptide (1)..(813): Ceres Seq. ID no. 13652073

SEQ ID NO: 119121 - protein, 803 aa, Arabidopsis thaliana; identical to SEQ ID NO: 99636
  peptide (1)..(803): Ceres Seq. ID no. 13652074

SEQ ID NO: 119122 - DNA, 2426 bp, Arabidopsis thaliana; identical to SEQ ID NO: 107883
  misc_feature (1)..(2426): Ceres Seq. ID no. 13652075
  misc_feature (1)..(2426): Ortholog of  Ceres SEQ ID NO 15175771 as cited in SEQ ID NO 55443

SEQ ID NO: 119123 - protein, 303 aa, Arabidopsis thaliana; identical to SEQ ID NO: 107884
  peptide (1)..(303): Ceres Seq. ID no. 13652076

SEQ ID NO: 119124 - protein, 248 aa, Arabidopsis thaliana; identical to SEQ ID NO: 107885
  peptide (1)..(248): Ceres Seq. ID no. 13652077

SEQ ID NO: 119125 - protein, 244 aa, Arabidopsis thaliana; identical to SEQ ID NO: 107886
  peptide (1)..(244): Ceres Seq. ID no. 13652078

SEQ ID NO: 119126 - DNA, 1448 bp, Arabidopsis thaliana; identical to SEQ ID NO: 107887
  misc_feature (1)..(1448): Ceres Seq. ID no. 13652099
  misc_feature (1)..(1448): Ortholog of  Ceres SEQ ID NO 12612314 as cited in SEQ ID NO 51420
  misc_feature (1)..(1448): Ortholog of  Ceres SEQ ID NO 14306493 as cited in SEQ ID NO 53170
  misc_feature (1)..(1448): Ortholog of  Ceres SEQ ID NO 14311095 as cited in SEQ ID NO 53197

SEQ ID NO: 119127 - protein, 454 aa, Arabidopsis thaliana; identical to SEQ ID NO: 107888
  peptide (1)..(454): Ceres Seq. ID no. 13652100

SEQ ID NO: 119128 - protein, 451 aa, Arabidopsis thaliana; identical to SEQ ID NO: 107889
  peptide (1)..(451): Ceres Seq. ID no. 13652101

SEQ ID NO: 119129 - protein, 415 aa, Arabidopsis thaliana; identical to SEQ ID NO: 107890
  peptide (1)..(415): Ceres Seq. ID no. 13652102

SEQ ID NO: 119130 - DNA, 1473 bp, Arabidopsis thaliana; identical to SEQ ID NO: 107891
  misc_feature (1)..(1473): Ceres Seq. ID no. 13652103
  misc_feature (1)..(1473): Ortholog of  Ceres SEQ ID NO 13639663 as cited in SEQ ID NO 57850

SEQ ID NO: 119131 - protein, 158 aa, Arabidopsis thaliana; identical to SEQ ID NO: 107892
  peptide (1)..(158): Ceres Seq. ID no. 13652104

SEQ ID NO: 119132 - protein, 86 aa, Arabidopsis thaliana; identical to SEQ ID NO: 107893
  peptide (1)..(86): Ceres Seq. ID no. 13652105

SEQ ID NO: 119133 - protein, 84 aa, Arabidopsis thaliana; identical to SEQ ID NO: 107894
  peptide (1)..(84): Ceres Seq. ID no. 13652106

SEQ ID NO: 119134 - DNA, 1768 bp, Arabidopsis thaliana; identical to SEQ ID NO: 107895
  misc_feature (1)..(1768): Ceres Seq. ID no. 13652115
  misc_feature (1)..(1768): Ortholog of  Ceres SEQ ID NO 15179578 as cited in SEQ ID NO 0

SEQ ID NO: 119135 - protein, 449 aa, Arabidopsis thaliana; identical to SEQ ID NO: 107896
  peptide (1)..(449): Ceres Seq. ID no. 13652116

SEQ ID NO: 119136 - protein, 365 aa, Arabidopsis thaliana; identical to SEQ ID NO: 46009
  peptide (1)..(365): Ceres Seq. ID no. 13652117

SEQ ID NO: 119137 - protein, 262 aa, Arabidopsis thaliana; identical to SEQ ID NO: 46010
  peptide (1)..(262): Ceres Seq. ID no. 13652118

SEQ ID NO: 119138 - DNA, 2072 bp, Arabidopsis thaliana; identical to SEQ ID NO: 107899
  misc_feature (1)..(2072): Ceres Seq. ID no. 13652136
  misc_feature (1)..(2072): Ortholog of  Ceres SEQ ID NO 15180350 as cited in SEQ ID NO 0

SEQ ID NO: 119139 - protein, 610 aa, Arabidopsis thaliana; identical to SEQ ID NO: 107900
  peptide (1)..(610): Ceres Seq. ID no. 13652137

SEQ ID NO: 119140 - protein, 476 aa, Arabidopsis thaliana; identical to SEQ ID NO: 107901
  peptide (1)..(476): Ceres Seq. ID no. 13652138

SEQ ID NO: 119141 - protein, 469 aa, Arabidopsis thaliana; identical to SEQ ID NO: 107902
  peptide (1)..(469): Ceres Seq. ID no. 13652139

SEQ ID NO: 119142 - DNA, 3417 bp, Arabidopsis thaliana; identical to SEQ ID NO: 107903
  misc_feature (1)..(3417): Ceres Seq. ID no. 13652164
  misc_feature (1)..(3417): Ortholog of  Ceres SEQ ID NO 15168378 as cited in SEQ ID NO 59129

SEQ ID NO: 119143 - protein, 953 aa, Arabidopsis thaliana; identical to SEQ ID NO: 107904
  peptide (1)..(953): Ceres Seq. ID no. 13652165

SEQ ID NO: 119144 - protein, 763 aa, Arabidopsis thaliana; identical to SEQ ID NO: 107905
  peptide (1)..(763): Ceres Seq. ID no. 13652166

SEQ ID NO: 119145 - protein, 736 aa, Arabidopsis thaliana; identical to SEQ ID NO: 107906
  peptide (1)..(736): Ceres Seq. ID no. 13652167

SEQ ID NO: 119146 - DNA, 2007 bp, Arabidopsis thaliana; identical to SEQ ID NO: 107907
  misc_feature (1)..(2007): Ceres Seq. ID no. 13652254
  misc_feature (1)..(2007): Ortholog of  Ceres SEQ ID NO 14307069 as cited in SEQ ID NO 54322

SEQ ID NO: 119147 - protein, 206 aa, Arabidopsis thaliana; identical to SEQ ID NO: 107908
  peptide (1)..(206): Ceres Seq. ID no. 13652255

SEQ ID NO: 119148 - protein, 161 aa, Arabidopsis thaliana; identical to SEQ ID NO: 107909
  peptide (1)..(161): Ceres Seq. ID no. 13652256

SEQ ID NO: 119149 - protein, 109 aa, Arabidopsis thaliana; identical to SEQ ID NO: 107910
  peptide (1)..(109): Ceres Seq. ID no. 13652257
  misc_feature (22)..(22): Xaa is any aa, unknown or other

SEQ ID NO: 119150 - DNA, 2114 bp, Arabidopsis thaliana; identical to SEQ ID NO: 107911
  misc_feature (1)..(2114): Ceres Seq. ID no. 13652258
  misc_feature (1)..(2114): Ortholog of  Ceres SEQ ID NO 14307069 as cited in SEQ ID NO 54322

SEQ ID NO: 119151 - protein, 206 aa, Arabidopsis thaliana; identical to SEQ ID NO: 107912
  peptide (1)..(206): Ceres Seq. ID no. 13652259

SEQ ID NO: 119152 - protein, 161 aa, Arabidopsis thaliana; identical to SEQ ID NO: 107909
  peptide (1)..(161): Ceres Seq. ID no. 13652260

SEQ ID NO: 119153 - protein, 109 aa, Arabidopsis thaliana; identical to SEQ ID NO: 107914
  peptide (1)..(109): Ceres Seq. ID no. 13652261

SEQ ID NO: 119154 - DNA, 1811 bp, Arabidopsis thaliana; identical to SEQ ID NO: 107915
  misc_feature (1)..(1811): Ceres Seq. ID no. 13652269
  misc_feature (1)..(1811): Ortholog of  Ceres SEQ ID NO 15174875 as cited in SEQ ID NO 56464

SEQ ID NO: 119155 - protein, 221 aa, Arabidopsis thaliana; identical to SEQ ID NO: 107916
  peptide (1)..(221): Ceres Seq. ID no. 13652270
  misc_feature (13)..(13): Xaa is any aa, unknown or other

SEQ ID NO: 119156 - protein, 208 aa, Arabidopsis thaliana; identical to SEQ ID NO: 107917
  peptide (1)..(208): Ceres Seq. ID no. 13652271

SEQ ID NO: 119157 - protein, 188 aa, Arabidopsis thaliana; identical to SEQ ID NO: 107918
  peptide (1)..(188): Ceres Seq. ID no. 13652272
  misc_feature (15)..(15): Xaa is any aa, unknown or other
  misc_feature (108)..(108): Xaa is any aa, unknown or other

SEQ ID NO: 119158 - DNA, 877 bp, Arabidopsis thaliana; identical to SEQ ID NO: 107919
  misc_feature (1)..(877): Ceres Seq. ID no. 13652311
  misc_feature (1)..(877): Ortholog of  Ceres SEQ ID NO 14304593 as cited in SEQ ID NO 52961
  misc_feature (1)..(877): Ortholog of  Ceres SEQ ID NO 14303440 as cited in SEQ ID NO 59496
  misc_feature (1)..(877): Ortholog of  Ceres SEQ ID NO 13642436 as cited in SEQ ID NO 59680

SEQ ID NO: 119159 - protein, 281 aa, Arabidopsis thaliana; identical to SEQ ID NO: 107920
  peptide (1)..(281): Ceres Seq. ID no. 13652312

SEQ ID NO: 119160 - protein, 279 aa, Arabidopsis thaliana; identical to SEQ ID NO: 107921
  peptide (1)..(279): Ceres Seq. ID no. 13652313

SEQ ID NO: 119161 - protein, 278 aa, Arabidopsis thaliana; identical to SEQ ID NO: 107922
  peptide (1)..(278): Ceres Seq. ID no. 13652314

SEQ ID NO: 119162 - DNA, 1494 bp, Arabidopsis thaliana; identical to SEQ ID NO: 107923
  misc_feature (1)..(1494): Ceres Seq. ID no. 13652319
  misc_feature (1)..(1494): Ortholog of  Ceres SEQ ID NO 14311032 as cited in SEQ ID NO 54590
  misc_feature (1)..(1494): Ortholog of  Ceres SEQ ID NO 15170493 as cited in SEQ ID NO 58432

SEQ ID NO: 119163 - protein, 262 aa, Arabidopsis thaliana; identical to SEQ ID NO: 107924
  peptide (1)..(262): Ceres Seq. ID no. 13652320

SEQ ID NO: 119164 - protein, 250 aa, Arabidopsis thaliana; identical to SEQ ID NO: 107925
  peptide (1)..(250): Ceres Seq. ID no. 13652321

SEQ ID NO: 119165 - protein, 224 aa, Arabidopsis thaliana; identical to SEQ ID NO: 107926
  peptide (1)..(224): Ceres Seq. ID no. 13652322

SEQ ID NO: 119166 - DNA, 1055 bp, Arabidopsis thaliana; identical to SEQ ID NO: 107927
  misc_feature (1)..(1055): Ceres Seq. ID no. 13652327
  misc_feature (1)..(1055): Ortholog of  Ceres SEQ ID NO 15226238 as cited in SEQ ID NO 68840
  misc_feature (1)..(1055): Ortholog of  Ceres SEQ ID NO 12635175 as cited in SEQ ID NO 0
  misc_feature (1)..(1055): Ortholog of  Ceres SEQ ID NO 14306100 as cited in SEQ ID NO 0

SEQ ID NO: 119167 - protein, 215 aa, Arabidopsis thaliana; identical to SEQ ID NO: 90784
  peptide (1)..(215): Ceres Seq. ID no. 13652328

SEQ ID NO: 119168 - protein, 170 aa, Arabidopsis thaliana; identical to SEQ ID NO: 90785
  peptide (1)..(170): Ceres Seq. ID no. 13652329

SEQ ID NO: 119169 - protein, 148 aa, Arabidopsis thaliana; identical to SEQ ID NO: 107930
  peptide (1)..(148): Ceres Seq. ID no. 13652330

SEQ ID NO: 119170 - DNA, 1612 bp, Arabidopsis thaliana; identical to SEQ ID NO: 107931
  misc_feature (1)..(1612): Ceres Seq. ID no. 13652331
  misc_feature (1)..(1612): Ortholog of  Ceres SEQ ID NO 13663839 as cited in SEQ ID NO 60834

SEQ ID NO: 119171 - protein, 526 aa, Arabidopsis thaliana; identical to SEQ ID NO: 107932
  peptide (1)..(526): Ceres Seq. ID no. 13652332

SEQ ID NO: 119172 - protein, 442 aa, Arabidopsis thaliana; identical to SEQ ID NO: 107933
  peptide (1)..(442): Ceres Seq. ID no. 13652333

SEQ ID NO: 119173 - protein, 421 aa, Arabidopsis thaliana; identical to SEQ ID NO: 107934
  peptide (1)..(421): Ceres Seq. ID no. 13652334

SEQ ID NO: 119174 - DNA, 1125 bp, Arabidopsis thaliana; identical to SEQ ID NO: 107935
  misc_feature (1)..(1125): Ceres Seq. ID no. 13652351
  misc_feature (1)..(1125): Ortholog of  Ceres SEQ ID NO 13581889 as cited in SEQ ID NO 50900
  misc_feature (1)..(1125): Ortholog of  Ceres SEQ ID NO 13581902 as cited in SEQ ID NO 52223
  misc_feature (1)..(1125): Ortholog of  Ceres SEQ ID NO 12585528 as cited in SEQ ID NO 62991

SEQ ID NO: 119175 - protein, 161 aa, Arabidopsis thaliana; identical to SEQ ID NO: 107936
  peptide (1)..(161): Ceres Seq. ID no. 13652352

SEQ ID NO: 119176 - protein, 136 aa, Arabidopsis thaliana; identical to SEQ ID NO: 8709
  peptide (1)..(136): Ceres Seq. ID no. 13652353

SEQ ID NO: 119177 - DNA, 1121 bp, Arabidopsis thaliana; identical to SEQ ID NO: 107938
  misc_feature (1)..(1121): Ceres Seq. ID no. 13652380
  misc_feature (1)..(1121): Ortholog of  Ceres SEQ ID NO 15177557 as cited in SEQ ID NO 53220
  misc_feature (1)..(1121): Ortholog of  Ceres SEQ ID NO 14313123 as cited in SEQ ID NO 54602

SEQ ID NO: 119178 - protein, 292 aa, Arabidopsis thaliana; identical to SEQ ID NO: 48076
  peptide (1)..(292): Ceres Seq. ID no. 13652381

SEQ ID NO: 119179 - protein, 290 aa, Arabidopsis thaliana; identical to SEQ ID NO: 48077
  peptide (1)..(290): Ceres Seq. ID no. 13652382

SEQ ID NO: 119180 - protein, 288 aa, Arabidopsis thaliana; identical to SEQ ID NO: 107941
  peptide (1)..(288): Ceres Seq. ID no. 13652383

SEQ ID NO: 119181 - DNA, 1729 bp, Arabidopsis thaliana; identical to SEQ ID NO: 107942
  misc_feature (1)..(1729): Ceres Seq. ID no. 13652440
  misc_feature (1)..(1729): Ortholog of  Ceres SEQ ID NO 13597407 as cited in SEQ ID NO 64106

SEQ ID NO: 119182 - protein, 358 aa, Arabidopsis thaliana; identical to SEQ ID NO: 107943
  peptide (1)..(358): Ceres Seq. ID no. 13652441

SEQ ID NO: 119183 - protein, 338 aa, Arabidopsis thaliana; identical to SEQ ID NO: 107944
  peptide (1)..(338): Ceres Seq. ID no. 13652442

SEQ ID NO: 119184 - protein, 328 aa, Arabidopsis thaliana; identical to SEQ ID NO: 107945
  peptide (1)..(328): Ceres Seq. ID no. 13652443

SEQ ID NO: 119185 - DNA, 1277 bp, Arabidopsis thaliana; identical to SEQ ID NO: 107946
  misc_feature (1)..(1277): Ceres Seq. ID no. 13652448
  misc_feature (1)..(1277): Ortholog of  Ceres SEQ ID NO 13656436 as cited in SEQ ID NO 69154

SEQ ID NO: 119186 - protein, 147 aa, Arabidopsis thaliana; identical to SEQ ID NO: 107947
  peptide (1)..(147): Ceres Seq. ID no. 13652449

SEQ ID NO: 119187 - protein, 138 aa, Arabidopsis thaliana; identical to SEQ ID NO: 107948
  peptide (1)..(138): Ceres Seq. ID no. 13652450

SEQ ID NO: 119188 - protein, 129 aa, Arabidopsis thaliana; identical to SEQ ID NO: 107949
  peptide (1)..(129): Ceres Seq. ID no. 13652451

SEQ ID NO: 119189 - DNA, 1261 bp, Arabidopsis thaliana; identical to SEQ ID NO: 107950
  misc_feature (1)..(1261): Ceres Seq. ID no. 13652452
  misc_feature (1)..(1261): Ortholog of  Ceres SEQ ID NO 13622227 as cited in SEQ ID NO 413
  misc_feature (1)..(1261): Ortholog of  Ceres SEQ ID NO 12563124 as cited in SEQ ID NO 57104
  misc_feature (1)..(1261): Ortholog of  Ceres SEQ ID NO 12617639 as cited in SEQ ID NO 65219

SEQ ID NO: 119190 - protein, 215 aa, Arabidopsis thaliana; identical to SEQ ID NO: 98573
  peptide (1)..(215): Ceres Seq. ID no. 13652453

SEQ ID NO: 119191 - protein, 209 aa, Arabidopsis thaliana; identical to SEQ ID NO: 98574
  peptide (1)..(209): Ceres Seq. ID no. 13652454

SEQ ID NO: 119192 - protein, 183 aa, Arabidopsis thaliana; identical to SEQ ID NO: 98575
  peptide (1)..(183): Ceres Seq. ID no. 13652455

SEQ ID NO: 119193 - DNA, 1596 bp, Arabidopsis thaliana; identical to SEQ ID NO: 107954
  misc_feature (1)..(1596): Ceres Seq. ID no. 13652484
  misc_feature (1)..(1596): Ortholog of  Ceres SEQ ID NO 14314643 as cited in SEQ ID NO 56903

SEQ ID NO: 119194 - protein, 392 aa, Arabidopsis thaliana; identical to SEQ ID NO: 107955
  peptide (1)..(392): Ceres Seq. ID no. 13652485

SEQ ID NO: 119195 - protein, 342 aa, Arabidopsis thaliana; identical to SEQ ID NO: 107956
  peptide (1)..(342): Ceres Seq. ID no. 13652486

SEQ ID NO: 119196 - protein, 340 aa, Arabidopsis thaliana; identical to SEQ ID NO: 107957
  peptide (1)..(340): Ceres Seq. ID no. 13652487

SEQ ID NO: 119197 - DNA, 1084 bp, Arabidopsis thaliana; identical to SEQ ID NO: 107958
  misc_feature (1)..(1084): Ceres Seq. ID no. 13652666
  misc_feature (1)..(1084): Ortholog of  Ceres SEQ ID NO 14308080 as cited in SEQ ID NO 55218
  misc_feature (1)..(1084): Ortholog of  Ceres SEQ ID NO 14309287 as cited in SEQ ID NO 0

SEQ ID NO: 119198 - protein, 269 aa, Arabidopsis thaliana; identical to SEQ ID NO: 107959
  peptide (1)..(269): Ceres Seq. ID no. 13652667
  misc_feature (40)..(40): Xaa is any aa, unknown or other

SEQ ID NO: 119199 - protein, 226 aa, Arabidopsis thaliana; identical to SEQ ID NO: 72076
  peptide (1)..(226): Ceres Seq. ID no. 13652668

SEQ ID NO: 119200 - protein, 217 aa, Arabidopsis thaliana; identical to SEQ ID NO: 72077
  peptide (1)..(217): Ceres Seq. ID no. 13652669

SEQ ID NO: 119201 - DNA, 809 bp, Arabidopsis thaliana; identical to SEQ ID NO: 107962
  misc_feature (1)..(809): Ceres Seq. ID no. 13652714
  misc_feature (1)..(809): Ortholog of  Ceres SEQ ID NO 14304228 as cited in SEQ ID NO 56358

SEQ ID NO: 119202 - protein, 180 aa, Arabidopsis thaliana; identical to SEQ ID NO: 107963
  peptide (1)..(180): Ceres Seq. ID no. 13652715

SEQ ID NO: 119203 - protein, 179 aa, Arabidopsis thaliana; identical to SEQ ID NO: 24941
  peptide (1)..(179): Ceres Seq. ID no. 13652716

SEQ ID NO: 119204 - DNA, 1979 bp, Arabidopsis thaliana; identical to SEQ ID NO: 107965
  misc_feature (1)..(1979): Ceres Seq. ID no. 13652767
  misc_feature (1)..(1979): Ortholog of  Ceres SEQ ID NO 15172020 as cited in SEQ ID NO 59739

SEQ ID NO: 119205 - protein, 552 aa, Arabidopsis thaliana; identical to SEQ ID NO: 107966
  peptide (1)..(552): Ceres Seq. ID no. 13652768
  misc_feature (42)..(42): Xaa is any aa, unknown or other
  misc_feature (334)..(334): Xaa is any aa, unknown or other

SEQ ID NO: 119206 - protein, 540 aa, Arabidopsis thaliana; identical to SEQ ID NO: 107967
  peptide (1)..(540): Ceres Seq. ID no. 13652769
  misc_feature (30)..(30): Xaa is any aa, unknown or other
  misc_feature (322)..(322): Xaa is any aa, unknown or other

SEQ ID NO: 119207 - protein, 470 aa, Arabidopsis thaliana; identical to SEQ ID NO: 107968
  peptide (1)..(470): Ceres Seq. ID no. 13652770
  misc_feature (252)..(252): Xaa is any aa, unknown or other

SEQ ID NO: 119208 - DNA, 1067 bp, Arabidopsis thaliana; identical to SEQ ID NO: 107969
  misc_feature (1)..(1067): Ceres Seq. ID no. 13652781
  misc_feature (1)..(1067): Ortholog of  Ceres SEQ ID NO 14305858 as cited in SEQ ID NO 52329

SEQ ID NO: 119209 - protein, 223 aa, Arabidopsis thaliana; identical to SEQ ID NO: 107970
  peptide (1)..(223): Ceres Seq. ID no. 13652782

SEQ ID NO: 119210 - protein, 204 aa, Arabidopsis thaliana; identical to SEQ ID NO: 107971
  peptide (1)..(204): Ceres Seq. ID no. 13652783

SEQ ID NO: 119211 - protein, 118 aa, Arabidopsis thaliana; identical to SEQ ID NO: 107972
  peptide (1)..(118): Ceres Seq. ID no. 13652784

SEQ ID NO: 119212 - DNA, 1675 bp, Arabidopsis thaliana; identical to SEQ ID NO: 107973
  misc_feature (1)..(1675): Ceres Seq. ID no. 13652881
  misc_feature (1)..(1675): Ortholog of  Ceres SEQ ID NO 13594037 as cited in SEQ ID NO 55666
  misc_feature (1)..(1675): Ortholog of  Ceres SEQ ID NO 13657707 as cited in SEQ ID NO 66407

SEQ ID NO: 119213 - protein, 519 aa, Arabidopsis thaliana; identical to SEQ ID NO: 107974
  peptide (1)..(519): Ceres Seq. ID no. 13652882

SEQ ID NO: 119214 - protein, 506 aa, Arabidopsis thaliana; identical to SEQ ID NO: 107975
  peptide (1)..(506): Ceres Seq. ID no. 13652883

SEQ ID NO: 119215 - protein, 484 aa, Arabidopsis thaliana; identical to SEQ ID NO: 107976
  peptide (1)..(484): Ceres Seq. ID no. 13652884

SEQ ID NO: 119216 - DNA, 749 bp, Arabidopsis thaliana; identical to SEQ ID NO: 107977
  misc_feature (1)..(749): Ceres Seq. ID no. 13652889
  misc_feature (1)..(749): Ortholog of  Ceres SEQ ID NO 15178852 as cited in SEQ ID NO 0

SEQ ID NO: 119217 - protein, 157 aa, Arabidopsis thaliana; identical to SEQ ID NO: 35345
  peptide (1)..(157): Ceres Seq. ID no. 13652890

SEQ ID NO: 119218 - DNA, 1219 bp, Arabidopsis thaliana; identical to SEQ ID NO: 107979
  misc_feature (1)..(1219): Ceres Seq. ID no. 13652895
  misc_feature (1)..(1219): Ortholog of  Ceres SEQ ID NO 14308120 as cited in SEQ ID NO 58423
  misc_feature (1)..(1219): Ortholog of  Ceres SEQ ID NO 14307004 as cited in SEQ ID NO 59551
  misc_feature (1)..(1219): Ortholog of  Ceres SEQ ID NO 13661504 as cited in SEQ ID NO 61294
  misc_feature (1)..(1219): Ortholog of  Ceres SEQ ID NO 12617197 as cited in SEQ ID NO 63406
  misc_feature (1)..(1219): Ortholog of  Ceres SEQ ID NO 13597804 as cited in SEQ ID NO 64182
  misc_feature (1)..(1219): Ortholog of  Ceres SEQ ID NO 13598565 as cited in SEQ ID NO 65250
  misc_feature (1)..(1219): Ortholog of  Ceres SEQ ID NO 13598597 as cited in SEQ ID NO 65496
  misc_feature (1)..(1219): Ortholog of  Ceres SEQ ID NO 13596284 as cited in SEQ ID NO 68273
  misc_feature (1)..(1219): Ortholog of  Ceres SEQ ID NO 13596227 as cited in SEQ ID NO 68750
  misc_feature (1)..(1219): Ortholog of  Ceres SEQ ID NO 15178902 as cited in SEQ ID NO 0

SEQ ID NO: 119219 - protein, 318 aa, Arabidopsis thaliana; identical to SEQ ID NO: 40384
  peptide (1)..(318): Ceres Seq. ID no. 13652896

SEQ ID NO: 119220 - DNA, 2304 bp, Arabidopsis thaliana; identical to SEQ ID NO: 107981
  misc_feature (1)..(2304): Ceres Seq. ID no. 13652905
  misc_feature (1)..(2304): Ortholog of  Ceres SEQ ID NO 15178173 as cited in SEQ ID NO 54139
  misc_feature (1)..(2304): Ortholog of  Ceres SEQ ID NO 14304136 as cited in SEQ ID NO 59024

SEQ ID NO: 119221 - protein, 271 aa, Arabidopsis thaliana; identical to SEQ ID NO: 107982
  peptide (1)..(271): Ceres Seq. ID no. 13652906

SEQ ID NO: 119222 - protein, 239 aa, Arabidopsis thaliana; identical to SEQ ID NO: 107983
  peptide (1)..(239): Ceres Seq. ID no. 13652907

SEQ ID NO: 119223 - protein, 147 aa, Arabidopsis thaliana; identical to SEQ ID NO: 107984
  peptide (1)..(147): Ceres Seq. ID no. 13652908

SEQ ID NO: 119224 - DNA, 1931 bp, Arabidopsis thaliana; identical to SEQ ID NO: 107985
  misc_feature (1)..(1931): Ceres Seq. ID no. 13652913
  misc_feature (1)..(1931): Ortholog of  Ceres SEQ ID NO 15178169 as cited in SEQ ID NO 58511

SEQ ID NO: 119225 - protein, 423 aa, Arabidopsis thaliana; identical to SEQ ID NO: 107986
  peptide (1)..(423): Ceres Seq. ID no. 13652914

SEQ ID NO: 119226 - protein, 384 aa, Arabidopsis thaliana; identical to SEQ ID NO: 107987
  peptide (1)..(384): Ceres Seq. ID no. 13652915

SEQ ID NO: 119227 - protein, 297 aa, Arabidopsis thaliana; identical to SEQ ID NO: 107988
  peptide (1)..(297): Ceres Seq. ID no. 13652916

SEQ ID NO: 119228 - DNA, 1311 bp, Arabidopsis thaliana; identical to SEQ ID NO: 107989
  misc_feature (1)..(1311): Ceres Seq. ID no. 13652963
  misc_feature (1)..(1311): Ortholog of  Ceres SEQ ID NO 14311489 as cited in SEQ ID NO 51404
  misc_feature (1)..(1311): Ortholog of  Ceres SEQ ID NO 12607391 as cited in SEQ ID NO 59508
  misc_feature (1)..(1311): Ortholog of  Ceres SEQ ID NO 15169292 as cited in SEQ ID NO 59616

SEQ ID NO: 119229 - protein, 377 aa, Arabidopsis thaliana; identical to SEQ ID NO: 107990
  peptide (1)..(377): Ceres Seq. ID no. 13652964

SEQ ID NO: 119230 - protein, 347 aa, Arabidopsis thaliana; identical to SEQ ID NO: 107991
  peptide (1)..(347): Ceres Seq. ID no. 13652965

SEQ ID NO: 119231 - protein, 196 aa, Arabidopsis thaliana; identical to SEQ ID NO: 97009
  peptide (1)..(196): Ceres Seq. ID no. 13652966

SEQ ID NO: 119232 - DNA, 2336 bp, Arabidopsis thaliana; identical to SEQ ID NO: 107993
  misc_feature (1)..(2336): Ceres Seq. ID no. 13652971
  misc_feature (1)..(2336): Ortholog of  Ceres SEQ ID NO 13598023 as cited in SEQ ID NO 66487

SEQ ID NO: 119233 - protein, 719 aa, Arabidopsis thaliana; identical to SEQ ID NO: 107994
  peptide (1)..(719): Ceres Seq. ID no. 13652972

SEQ ID NO: 119234 - protein, 587 aa, Arabidopsis thaliana; identical to SEQ ID NO: 107995
  peptide (1)..(587): Ceres Seq. ID no. 13652973

SEQ ID NO: 119235 - protein, 534 aa, Arabidopsis thaliana; identical to SEQ ID NO: 74171
  peptide (1)..(534): Ceres Seq. ID no. 13652974

SEQ ID NO: 119236 - DNA, 1966 bp, Arabidopsis thaliana; identical to SEQ ID NO: 107997
  misc_feature (1)..(1966): Ceres Seq. ID no. 13652975
  misc_feature (1)..(1966): Ortholog of  Ceres SEQ ID NO 14314108 as cited in SEQ ID NO 63184

SEQ ID NO: 119237 - protein, 433 aa, Arabidopsis thaliana; identical to SEQ ID NO: 107998
  peptide (1)..(433): Ceres Seq. ID no. 13652976

SEQ ID NO: 119238 - protein, 366 aa, Arabidopsis thaliana; identical to SEQ ID NO: 107999
  peptide (1)..(366): Ceres Seq. ID no. 13652977

SEQ ID NO: 119239 - protein, 351 aa, Arabidopsis thaliana; identical to SEQ ID NO: 108000
  peptide (1)..(351): Ceres Seq. ID no. 13652978

SEQ ID NO: 119240 - DNA, 1726 bp, Arabidopsis thaliana; identical to SEQ ID NO: 108001
  misc_feature (1)..(1726): Ceres Seq. ID no. 13652991
  misc_feature (1)..(1726): Ortholog of  Ceres SEQ ID NO 15176922 as cited in SEQ ID NO 55251

SEQ ID NO: 119241 - protein, 536 aa, Arabidopsis thaliana; identical to SEQ ID NO: 108002
  peptide (1)..(536): Ceres Seq. ID no. 13652992

SEQ ID NO: 119242 - protein, 521 aa, Arabidopsis thaliana; identical to SEQ ID NO: 108003
  peptide (1)..(521): Ceres Seq. ID no. 13652993

SEQ ID NO: 119243 - protein, 444 aa, Arabidopsis thaliana; identical to SEQ ID NO: 108004
  peptide (1)..(444): Ceres Seq. ID no. 13652994

SEQ ID NO: 119244 - DNA, 1360 bp, Arabidopsis thaliana; identical to SEQ ID NO: 108005
  misc_feature (1)..(1360): Ceres Seq. ID no. 13652995
  misc_feature (1)..(1360): Ortholog of  Ceres SEQ ID NO 14306443 as cited in SEQ ID NO 53658

SEQ ID NO: 119245 - protein, 346 aa, Arabidopsis thaliana; identical to SEQ ID NO: 108006
  peptide (1)..(346): Ceres Seq. ID no. 13652996

SEQ ID NO: 119246 - DNA, 1637 bp, Arabidopsis thaliana; identical to SEQ ID NO: 108007
  misc_feature (1)..(1637): Ceres Seq. ID no. 13653001
  misc_feature (1)..(1637): Ortholog of  Ceres SEQ ID NO 15170155 as cited in SEQ ID NO 64363

SEQ ID NO: 119247 - protein, 439 aa, Arabidopsis thaliana; identical to SEQ ID NO: 108008
  peptide (1)..(439): Ceres Seq. ID no. 13653002

SEQ ID NO: 119248 - protein, 437 aa, Arabidopsis thaliana; identical to SEQ ID NO: 108009
  peptide (1)..(437): Ceres Seq. ID no. 13653003

SEQ ID NO: 119249 - protein, 412 aa, Arabidopsis thaliana; identical to SEQ ID NO: 108010
  peptide (1)..(412): Ceres Seq. ID no. 13653004

SEQ ID NO: 119250 - DNA, 2322 bp, Arabidopsis thaliana; identical to SEQ ID NO: 108011
  misc_feature (1)..(2322): Ceres Seq. ID no. 13653017
  misc_feature (1)..(2322): Ortholog of  Ceres SEQ ID NO 14315634 as cited in SEQ ID NO 53029

SEQ ID NO: 119251 - protein, 646 aa, Arabidopsis thaliana; identical to SEQ ID NO: 108012
  peptide (1)..(646): Ceres Seq. ID no. 13653018

SEQ ID NO: 119252 - protein, 642 aa, Arabidopsis thaliana; identical to SEQ ID NO: 108013
  peptide (1)..(642): Ceres Seq. ID no. 13653019

SEQ ID NO: 119253 - protein, 540 aa, Arabidopsis thaliana; identical to SEQ ID NO: 108014
  peptide (1)..(540): Ceres Seq. ID no. 13653020

SEQ ID NO: 119254 - DNA, 1761 bp, Arabidopsis thaliana; identical to SEQ ID NO: 108015
  misc_feature (1)..(1761): Ceres Seq. ID no. 13653021
  misc_feature (1)..(1761): Ortholog of  Ceres SEQ ID NO 14305780 as cited in SEQ ID NO 52430

SEQ ID NO: 119255 - protein, 313 aa, Arabidopsis thaliana; identical to SEQ ID NO: 108016
  peptide (1)..(313): Ceres Seq. ID no. 13653022

SEQ ID NO: 119256 - protein, 308 aa, Arabidopsis thaliana; identical to SEQ ID NO: 108017
  peptide (1)..(308): Ceres Seq. ID no. 13653023

SEQ ID NO: 119257 - protein, 200 aa, Arabidopsis thaliana; identical to SEQ ID NO: 108018
  peptide (1)..(200): Ceres Seq. ID no. 13653024

SEQ ID NO: 119258 - DNA, 1650 bp, Arabidopsis thaliana; identical to SEQ ID NO: 108019
  misc_feature (1)..(1650): Ceres Seq. ID no. 13653029
  misc_feature (1)..(1650): Ortholog of  Ceres SEQ ID NO 14314620 as cited in SEQ ID NO 56872
  misc_feature (1)..(1650): Ortholog of  Ceres SEQ ID NO 15178460 as cited in SEQ ID NO 66107

SEQ ID NO: 119259 - protein, 458 aa, Arabidopsis thaliana; identical to SEQ ID NO: 108020
  peptide (1)..(458): Ceres Seq. ID no. 13653030

SEQ ID NO: 119260 - protein, 428 aa, Arabidopsis thaliana; identical to SEQ ID NO: 108021
  peptide (1)..(428): Ceres Seq. ID no. 13653031

SEQ ID NO: 119261 - protein, 405 aa, Arabidopsis thaliana; identical to SEQ ID NO: 108022
  peptide (1)..(405): Ceres Seq. ID no. 13653032

SEQ ID NO: 119262 - DNA, 2702 bp, Arabidopsis thaliana; identical to SEQ ID NO: 108023
  misc_feature (1)..(2702): Ceres Seq. ID no. 13653033
  misc_feature (1)..(2702): Ortholog of  Ceres SEQ ID NO 14309727 as cited in SEQ ID NO 1030
  misc_feature (1)..(2702): Ortholog of  Ceres SEQ ID NO 13581686 as cited in SEQ ID NO 57695
  misc_feature (1)..(2702): Ortholog of  Ceres SEQ ID NO 15224315 as cited in SEQ ID NO 66131

SEQ ID NO: 119263 - protein, 622 aa, Arabidopsis thaliana; identical to SEQ ID NO: 108024
  peptide (1)..(622): Ceres Seq. ID no. 13653034

SEQ ID NO: 119264 - protein, 617 aa, Arabidopsis thaliana; identical to SEQ ID NO: 108025
  peptide (1)..(617): Ceres Seq. ID no. 13653035

SEQ ID NO: 119265 - protein, 576 aa, Arabidopsis thaliana; identical to SEQ ID NO: 108026
  peptide (1)..(576): Ceres Seq. ID no. 13653036

SEQ ID NO: 119266 - DNA, 1631 bp, Arabidopsis thaliana; identical to SEQ ID NO: 108027
  misc_feature (1)..(1631): Ceres Seq. ID no. 13653049
  misc_feature (1)..(1631): Ortholog of  Ceres SEQ ID NO 13654928 as cited in SEQ ID NO 62546

SEQ ID NO: 119267 - protein, 143 aa, Arabidopsis thaliana; identical to SEQ ID NO: 108028
  peptide (1)..(143): Ceres Seq. ID no. 13653050

SEQ ID NO: 119268 - protein, 133 aa, Arabidopsis thaliana; identical to SEQ ID NO: 108029
  peptide (1)..(133): Ceres Seq. ID no. 13653051

SEQ ID NO: 119269 - protein, 111 aa, Arabidopsis thaliana; identical to SEQ ID NO: 108030
  peptide (1)..(111): Ceres Seq. ID no. 13653052

SEQ ID NO: 119270 - DNA, 1635 bp, Arabidopsis thaliana; identical to SEQ ID NO: 108031
  misc_feature (1)..(1635): Ceres Seq. ID no. 13653063
  misc_feature (1)..(1635): Ortholog of  Ceres SEQ ID NO 15176457 as cited in SEQ ID NO 55547
  misc_feature (1)..(1635): Ortholog of  Ceres SEQ ID NO 13594349 as cited in SEQ ID NO 58161
  misc_feature (1)..(1635): Ortholog of  Ceres SEQ ID NO 13663419 as cited in SEQ ID NO 66561

SEQ ID NO: 119271 - protein, 442 aa, Arabidopsis thaliana; identical to SEQ ID NO: 108032
  peptide (1)..(442): Ceres Seq. ID no. 13653064

SEQ ID NO: 119272 - protein, 434 aa, Arabidopsis thaliana; identical to SEQ ID NO: 108033
  peptide (1)..(434): Ceres Seq. ID no. 13653065

SEQ ID NO: 119273 - protein, 431 aa, Arabidopsis thaliana; identical to SEQ ID NO: 108034
  peptide (1)..(431): Ceres Seq. ID no. 13653066

SEQ ID NO: 119274 - DNA, 1340 bp, Arabidopsis thaliana; identical to SEQ ID NO: 108035
  misc_feature (1)..(1340): Ceres Seq. ID no. 13653067
  misc_feature (1)..(1340): Ortholog of  Ceres SEQ ID NO 15170659 as cited in SEQ ID NO 67270

SEQ ID NO: 119275 - protein, 205 aa, Arabidopsis thaliana; identical to SEQ ID NO: 24044
  peptide (1)..(205): Ceres Seq. ID no. 13653068

SEQ ID NO: 119276 - protein, 149 aa, Arabidopsis thaliana; identical to SEQ ID NO: 108037
  peptide (1)..(149): Ceres Seq. ID no. 13653069

SEQ ID NO: 119277 - protein, 146 aa, Arabidopsis thaliana; identical to SEQ ID NO: 24046
  peptide (1)..(146): Ceres Seq. ID no. 13653070

SEQ ID NO: 119278 - DNA, 2064 bp, Arabidopsis thaliana; identical to SEQ ID NO: 108039
  misc_feature (1)..(2064): Ceres Seq. ID no. 13653082
  misc_feature (1)..(2064): Ortholog of  Ceres SEQ ID NO 14314252 as cited in SEQ ID NO 57492
  misc_feature (1)..(2064): Ortholog of  Ceres SEQ ID NO 12608276 as cited in SEQ ID NO 57871
  misc_feature (1)..(2064): Ortholog of  Ceres SEQ ID NO 13598492 as cited in SEQ ID NO 63882
  misc_feature (1)..(2064): Ortholog of  Ceres SEQ ID NO 13657914 as cited in SEQ ID NO 66230
  misc_feature (1)..(2064): Ortholog of  Ceres SEQ ID NO 13595877 as cited in SEQ ID NO 67702
  misc_feature (1)..(2064): Ortholog of  Ceres SEQ ID NO 13622667 as cited in SEQ ID NO 0

SEQ ID NO: 119279 - protein, 324 aa, Arabidopsis thaliana; identical to SEQ ID NO: 108040
  peptide (1)..(324): Ceres Seq. ID no. 13653083

SEQ ID NO: 119280 - protein, 314 aa, Arabidopsis thaliana; identical to SEQ ID NO: 102772
  peptide (1)..(314): Ceres Seq. ID no. 13653084

SEQ ID NO: 119281 - protein, 240 aa, Arabidopsis thaliana; identical to SEQ ID NO: 102773
  peptide (1)..(240): Ceres Seq. ID no. 13653085

SEQ ID NO: 119282 - DNA, 794 bp, Arabidopsis thaliana; identical to SEQ ID NO: 108043
  misc_feature (1)..(794): Ceres Seq. ID no. 13653094
  misc_feature (1)..(794): Ortholog of  Ceres SEQ ID NO 14316118 as cited in SEQ ID NO 52391
  misc_feature (1)..(794): Ortholog of  Ceres SEQ ID NO 13664032 as cited in SEQ ID NO 67527

SEQ ID NO: 119283 - protein, 141 aa, Arabidopsis thaliana; identical to SEQ ID NO: 27889
  peptide (1)..(141): Ceres Seq. ID no. 13653095

SEQ ID NO: 119284 - protein, 107 aa, Arabidopsis thaliana; identical to SEQ ID NO: 27890
  peptide (1)..(107): Ceres Seq. ID no. 13653096

SEQ ID NO: 119285 - DNA, 1556 bp, Arabidopsis thaliana; identical to SEQ ID NO: 108046
  misc_feature (1)..(1556): Ceres Seq. ID no. 13653114
  misc_feature (1)..(1556): Ortholog of  Ceres SEQ ID NO 14306569 as cited in SEQ ID NO 53008

SEQ ID NO: 119286 - protein, 485 aa, Arabidopsis thaliana; identical to SEQ ID NO: 108047
  peptide (1)..(485): Ceres Seq. ID no. 13653115

SEQ ID NO: 119287 - protein, 466 aa, Arabidopsis thaliana; identical to SEQ ID NO: 108048
  peptide (1)..(466): Ceres Seq. ID no. 13653116

SEQ ID NO: 119288 - protein, 425 aa, Arabidopsis thaliana; identical to SEQ ID NO: 108049
  peptide (1)..(425): Ceres Seq. ID no. 13653117

SEQ ID NO: 119289 - DNA, 980 bp, Arabidopsis thaliana; identical to SEQ ID NO: 108050
  misc_feature (1)..(980): Ceres Seq. ID no. 13653118
  misc_feature (1)..(980): Ortholog of  Ceres SEQ ID NO 15179607 as cited in SEQ ID NO 0

SEQ ID NO: 119290 - protein, 201 aa, Arabidopsis thaliana; identical to SEQ ID NO: 108051
  peptide (1)..(201): Ceres Seq. ID no. 13653119

SEQ ID NO: 119291 - DNA, 2385 bp, Arabidopsis thaliana; identical to SEQ ID NO: 108052
  misc_feature (1)..(2385): Ceres Seq. ID no. 13653120
  misc_feature (1)..(2385): Ortholog of  Ceres SEQ ID NO 13646680 as cited in SEQ ID NO 20737

SEQ ID NO: 119292 - protein, 639 aa, Arabidopsis thaliana; identical to SEQ ID NO: 108053
  peptide (1)..(639): Ceres Seq. ID no. 13653121

SEQ ID NO: 119293 - protein, 494 aa, Arabidopsis thaliana; identical to SEQ ID NO: 108054
  peptide (1)..(494): Ceres Seq. ID no. 13653122

SEQ ID NO: 119294 - protein, 486 aa, Arabidopsis thaliana; identical to SEQ ID NO: 108055
  peptide (1)..(486): Ceres Seq. ID no. 13653123

SEQ ID NO: 119295 - DNA, 2594 bp, Arabidopsis thaliana; identical to SEQ ID NO: 108056
  misc_feature (1)..(2594): Ceres Seq. ID no. 13653128
  misc_feature (1)..(2594): Ortholog of  Ceres SEQ ID NO 13661594 as cited in SEQ ID NO 61098

SEQ ID NO: 119296 - protein, 738 aa, Arabidopsis thaliana; identical to SEQ ID NO: 108057
  peptide (1)..(738): Ceres Seq. ID no. 13653129

SEQ ID NO: 119297 - protein, 731 aa, Arabidopsis thaliana; identical to SEQ ID NO: 108058
  peptide (1)..(731): Ceres Seq. ID no. 13653130

SEQ ID NO: 119298 - protein, 691 aa, Arabidopsis thaliana; identical to SEQ ID NO: 108059
  peptide (1)..(691): Ceres Seq. ID no. 13653131

SEQ ID NO: 119299 - DNA, 1686 bp, Arabidopsis thaliana; identical to SEQ ID NO: 108060
  misc_feature (1)..(1686): Ceres Seq. ID no. 13653136
  misc_feature (1)..(1686): Ortholog of  Ceres SEQ ID NO 13594037 as cited in SEQ ID NO 55666
  misc_feature (1)..(1686): Ortholog of  Ceres SEQ ID NO 13657707 as cited in SEQ ID NO 66407

SEQ ID NO: 119300 - protein, 524 aa, Arabidopsis thaliana; identical to SEQ ID NO: 108061
  peptide (1)..(524): Ceres Seq. ID no. 13653137

SEQ ID NO: 119301 - protein, 513 aa, Arabidopsis thaliana; identical to SEQ ID NO: 108062
  peptide (1)..(513): Ceres Seq. ID no. 13653138

SEQ ID NO: 119302 - protein, 510 aa, Arabidopsis thaliana; identical to SEQ ID NO: 108063
  peptide (1)..(510): Ceres Seq. ID no. 13653139

SEQ ID NO: 119303 - DNA, 1307 bp, Arabidopsis thaliana; identical to SEQ ID NO: 108064
  misc_feature (1)..(1307): Ceres Seq. ID no. 13653140
  misc_feature (1)..(1307): Ortholog of  Ceres SEQ ID NO 15168429 as cited in SEQ ID NO 57818

SEQ ID NO: 119304 - protein, 376 aa, Arabidopsis thaliana; identical to SEQ ID NO: 108065
  peptide (1)..(376): Ceres Seq. ID no. 13653141

SEQ ID NO: 119305 - protein, 369 aa, Arabidopsis thaliana; identical to SEQ ID NO: 108066
  peptide (1)..(369): Ceres Seq. ID no. 13653142

SEQ ID NO: 119306 - protein, 322 aa, Arabidopsis thaliana; identical to SEQ ID NO: 108067
  peptide (1)..(322): Ceres Seq. ID no. 13653143

SEQ ID NO: 119307 - DNA, 1053 bp, Arabidopsis thaliana; identical to SEQ ID NO: 108068
  misc_feature (1)..(1053): Ceres Seq. ID no. 13653144
  misc_feature (1)..(1053): Ortholog of  Ceres SEQ ID NO 13596375 as cited in SEQ ID NO 68048

SEQ ID NO: 119308 - protein, 287 aa, Arabidopsis thaliana; identical to SEQ ID NO: 108069
  peptide (1)..(287): Ceres Seq. ID no. 13653145

SEQ ID NO: 119309 - protein, 209 aa, Arabidopsis thaliana; identical to SEQ ID NO: 108070
  peptide (1)..(209): Ceres Seq. ID no. 13653146

SEQ ID NO: 119310 - protein, 186 aa, Arabidopsis thaliana; identical to SEQ ID NO: 108071
  peptide (1)..(186): Ceres Seq. ID no. 13653147

SEQ ID NO: 119311 - DNA, 1107 bp, Arabidopsis thaliana; identical to SEQ ID NO: 108072
  misc_feature (1)..(1107): Ceres Seq. ID no. 13653148
  misc_feature (1)..(1107): Ortholog of  Ceres SEQ ID NO 13597757 as cited in SEQ ID NO 65472

SEQ ID NO: 119312 - protein, 257 aa, Arabidopsis thaliana; identical to SEQ ID NO: 87866
  peptide (1)..(257): Ceres Seq. ID no. 13653149

SEQ ID NO: 119313 - protein, 255 aa, Arabidopsis thaliana; identical to SEQ ID NO: 87867
  peptide (1)..(255): Ceres Seq. ID no. 13653150

SEQ ID NO: 119314 - protein, 249 aa, Arabidopsis thaliana; identical to SEQ ID NO: 87868
  peptide (1)..(249): Ceres Seq. ID no. 13653151

SEQ ID NO: 119315 - DNA, 1488 bp, Arabidopsis thaliana; identical to SEQ ID NO: 108076
  misc_feature (1)..(1488): Ceres Seq. ID no. 13653156
  misc_feature (1)..(1488): Ortholog of  Ceres SEQ ID NO 13664220 as cited in SEQ ID NO 61151
  misc_feature (1)..(1488): Ortholog of  Ceres SEQ ID NO 13597477 as cited in SEQ ID NO 65160

SEQ ID NO: 119316 - protein, 414 aa, Arabidopsis thaliana; identical to SEQ ID NO: 25219
  peptide (1)..(414): Ceres Seq. ID no. 13653157

SEQ ID NO: 119317 - protein, 402 aa, Arabidopsis thaliana; identical to SEQ ID NO: 25220
  peptide (1)..(402): Ceres Seq. ID no. 13653158

SEQ ID NO: 119318 - protein, 401 aa, Arabidopsis thaliana; identical to SEQ ID NO: 25221
  peptide (1)..(401): Ceres Seq. ID no. 13653159

SEQ ID NO: 119319 - DNA, 823 bp, Arabidopsis thaliana; identical to SEQ ID NO: 108080
  misc_feature (1)..(823): Ceres Seq. ID no. 13653171
  misc_feature (1)..(823): Ortholog of  Ceres SEQ ID NO 14304090 as cited in SEQ ID NO 53446
  misc_feature (1)..(823): Ortholog of  Ceres SEQ ID NO 14311355 as cited in SEQ ID NO 54082

SEQ ID NO: 119320 - protein, 217 aa, Arabidopsis thaliana; identical to SEQ ID NO: 108081
  peptide (1)..(217): Ceres Seq. ID no. 13653172

SEQ ID NO: 119321 - protein, 205 aa, Arabidopsis thaliana; identical to SEQ ID NO: 104385
  peptide (1)..(205): Ceres Seq. ID no. 13653173

SEQ ID NO: 119322 - protein, 204 aa, Arabidopsis thaliana; identical to SEQ ID NO: 104386
  peptide (1)..(204): Ceres Seq. ID no. 13653174

SEQ ID NO: 119323 - DNA, 1012 bp, Arabidopsis thaliana; identical to SEQ ID NO: 108084
  misc_feature (1)..(1012): Ceres Seq. ID no. 13653175
  misc_feature (1)..(1012): Ortholog of  Ceres SEQ ID NO 12609146 as cited in SEQ ID NO 52118
  misc_feature (1)..(1012): Ortholog of  Ceres SEQ ID NO 14316158 as cited in SEQ ID NO 52413
  misc_feature (1)..(1012): Ortholog of  Ceres SEQ ID NO 13638136 as cited in SEQ ID NO 58644
  misc_feature (1)..(1012): Ortholog of  Ceres SEQ ID NO 13596868 as cited in SEQ ID NO 62806
  misc_feature (1)..(1012): Ortholog of  Ceres SEQ ID NO 12587035 as cited in SEQ ID NO 63605
  misc_feature (1)..(1012): Ortholog of  Ceres SEQ ID NO 12566239 as cited in SEQ ID NO 0
  misc_feature (1)..(1012): Ortholog of  Ceres SEQ ID NO 13599119 as cited in SEQ ID NO 0

SEQ ID NO: 119324 - protein, 190 aa, Arabidopsis thaliana; identical to SEQ ID NO: 108085
  peptide (1)..(190): Ceres Seq. ID no. 13653176

SEQ ID NO: 119325 - protein, 142 aa, Arabidopsis thaliana; identical to SEQ ID NO: 108086
  peptide (1)..(142): Ceres Seq. ID no. 13653177

SEQ ID NO: 119326 - DNA, 1492 bp, Arabidopsis thaliana; identical to SEQ ID NO: 108087
  misc_feature (1)..(1492): Ceres Seq. ID no. 13653178
  misc_feature (1)..(1492): Ortholog of  Ceres SEQ ID NO 13582281 as cited in SEQ ID NO 51014

SEQ ID NO: 119327 - protein, 417 aa, Arabidopsis thaliana; identical to SEQ ID NO: 108088
  peptide (1)..(417): Ceres Seq. ID no. 13653179

SEQ ID NO: 119328 - protein, 409 aa, Arabidopsis thaliana; identical to SEQ ID NO: 108089
  peptide (1)..(409): Ceres Seq. ID no. 13653180

SEQ ID NO: 119329 - protein, 400 aa, Arabidopsis thaliana; identical to SEQ ID NO: 108090
  peptide (1)..(400): Ceres Seq. ID no. 13653181

SEQ ID NO: 119330 - DNA, 1620 bp, Arabidopsis thaliana; identical to SEQ ID NO: 108091
  misc_feature (1)..(1620): Ceres Seq. ID no. 13653186
  misc_feature (1)..(1620): Ortholog of  Ceres SEQ ID NO 13596984 as cited in SEQ ID NO 63196

SEQ ID NO: 119331 - protein, 409 aa, Arabidopsis thaliana; identical to SEQ ID NO: 108092
  peptide (1)..(409): Ceres Seq. ID no. 13653187

SEQ ID NO: 119332 - protein, 396 aa, Arabidopsis thaliana; identical to SEQ ID NO: 108093
  peptide (1)..(396): Ceres Seq. ID no. 13653188

SEQ ID NO: 119333 - protein, 389 aa, Arabidopsis thaliana; identical to SEQ ID NO: 108094
  peptide (1)..(389): Ceres Seq. ID no. 13653189

SEQ ID NO: 119334 - DNA, 1633 bp, Arabidopsis thaliana; identical to SEQ ID NO: 108095
  misc_feature (1)..(1633): Ceres Seq. ID no. 13653190
  misc_feature (1)..(1633): Ortholog of  Ceres SEQ ID NO 13596034 as cited in SEQ ID NO 62066

SEQ ID NO: 119335 - protein, 374 aa, Arabidopsis thaliana; identical to SEQ ID NO: 108096
  peptide (1)..(374): Ceres Seq. ID no. 13653191

SEQ ID NO: 119336 - protein, 361 aa, Arabidopsis thaliana; identical to SEQ ID NO: 108097
  peptide (1)..(361): Ceres Seq. ID no. 13653192

SEQ ID NO: 119337 - DNA, 1570 bp, Arabidopsis thaliana; identical to SEQ ID NO: 108098
  misc_feature (1)..(1570): Ceres Seq. ID no. 13653201
  misc_feature (1)..(1570): Ortholog of  Ceres SEQ ID NO 15169199 as cited in SEQ ID NO 55297
  misc_feature (1)..(1570): Ortholog of  Ceres SEQ ID NO 15175690 as cited in SEQ ID NO 55466
  misc_feature (1)..(1570): Ortholog of  Ceres SEQ ID NO 15171197 as cited in SEQ ID NO 56892

SEQ ID NO: 119338 - protein, 226 aa, Arabidopsis thaliana; identical to SEQ ID NO: 108099
  peptide (1)..(226): Ceres Seq. ID no. 13653202

SEQ ID NO: 119339 - protein, 217 aa, Arabidopsis thaliana; identical to SEQ ID NO: 108100
  peptide (1)..(217): Ceres Seq. ID no. 13653203

SEQ ID NO: 119340 - protein, 150 aa, Arabidopsis thaliana; identical to SEQ ID NO: 108101
  peptide (1)..(150): Ceres Seq. ID no. 13653204

SEQ ID NO: 119341 - DNA, 1707 bp, Arabidopsis thaliana; identical to SEQ ID NO: 108102
  misc_feature (1)..(1707): Ceres Seq. ID no. 13653205
  misc_feature (1)..(1707): Ortholog of  Ceres SEQ ID NO 14303366 as cited in SEQ ID NO 54418
  misc_feature (1)..(1707): Ortholog of  Ceres SEQ ID NO 13503610 as cited in SEQ ID NO 62416
  misc_feature (1)..(1707): Ortholog of  Ceres SEQ ID NO 13657610 as cited in SEQ ID NO 66165
  misc_feature (1)..(1707): Ortholog of  Ceres SEQ ID NO 13598312 as cited in SEQ ID NO 68448
  misc_feature (1)..(1707): Ortholog of  Ceres SEQ ID NO 13596100 as cited in SEQ ID NO 68573

SEQ ID NO: 119342 - protein, 492 aa, Arabidopsis thaliana; identical to SEQ ID NO: 108103
  peptide (1)..(492): Ceres Seq. ID no. 13653206

SEQ ID NO: 119343 - protein, 450 aa, Arabidopsis thaliana; identical to SEQ ID NO: 108104
  peptide (1)..(450): Ceres Seq. ID no. 13653207

SEQ ID NO: 119344 - protein, 415 aa, Arabidopsis thaliana; identical to SEQ ID NO: 108105
  peptide (1)..(415): Ceres Seq. ID no. 13653208

SEQ ID NO: 119345 - DNA, 1465 bp, Arabidopsis thaliana; identical to SEQ ID NO: 108106
  misc_feature (1)..(1465): Ceres Seq. ID no. 13653213
  misc_feature (1)..(1465): Ortholog of  Ceres SEQ ID NO 14311367 as cited in SEQ ID NO 53834

SEQ ID NO: 119346 - protein, 398 aa, Arabidopsis thaliana; identical to SEQ ID NO: 108107
  peptide (1)..(398): Ceres Seq. ID no. 13653214

SEQ ID NO: 119347 - protein, 393 aa, Arabidopsis thaliana; identical to SEQ ID NO: 108108
  peptide (1)..(393): Ceres Seq. ID no. 13653215

SEQ ID NO: 119348 - protein, 344 aa, Arabidopsis thaliana; identical to SEQ ID NO: 108109
  peptide (1)..(344): Ceres Seq. ID no. 13653216

SEQ ID NO: 119349 - DNA, 3478 bp, Arabidopsis thaliana; identical to SEQ ID NO: 108110
  misc_feature (1)..(3478): Ceres Seq. ID no. 13653217
  misc_feature (1)..(3478): Ortholog of  Ceres SEQ ID NO 13600310 as cited in SEQ ID NO 5086
  misc_feature (1)..(3478): Ortholog of  Ceres SEQ ID NO 14316099 as cited in SEQ ID NO 52473

SEQ ID NO: 119350 - protein, 983 aa, Arabidopsis thaliana; identical to SEQ ID NO: 108111
  peptide (1)..(983): Ceres Seq. ID no. 13653218

SEQ ID NO: 119351 - protein, 965 aa, Arabidopsis thaliana; identical to SEQ ID NO: 108112
  peptide (1)..(965): Ceres Seq. ID no. 13653219

SEQ ID NO: 119352 - protein, 927 aa, Arabidopsis thaliana; identical to SEQ ID NO: 108113
  peptide (1)..(927): Ceres Seq. ID no. 13653220

SEQ ID NO: 119353 - DNA, 1700 bp, Arabidopsis thaliana; identical to SEQ ID NO: 108114
  misc_feature (1)..(1700): Ceres Seq. ID no. 13653229
  misc_feature (1)..(1700): Ortholog of  Ceres SEQ ID NO 15170403 as cited in SEQ ID NO 53457
  misc_feature (1)..(1700): Ortholog of  Ceres SEQ ID NO 13660872 as cited in SEQ ID NO 60830
  misc_feature (1)..(1700): Ortholog of  Ceres SEQ ID NO 12616221 as cited in SEQ ID NO 63291

SEQ ID NO: 119354 - protein, 364 aa, Arabidopsis thaliana; identical to SEQ ID NO: 30723
  peptide (1)..(364): Ceres Seq. ID no. 13653230

SEQ ID NO: 119355 - protein, 226 aa, Arabidopsis thaliana; identical to SEQ ID NO: 30724
  peptide (1)..(226): Ceres Seq. ID no. 13653231

SEQ ID NO: 119356 - DNA, 1073 bp, Arabidopsis thaliana; identical to SEQ ID NO: 108117
  misc_feature (1)..(1073): Ceres Seq. ID no. 13653232
  misc_feature (1)..(1073): Ortholog of  Ceres SEQ ID NO 13662054 as cited in SEQ ID NO 61539
  misc_feature (1)..(1073): Ortholog of  Ceres SEQ ID NO 13663665 as cited in SEQ ID NO 67230
  misc_feature (1)..(1073): Ortholog of  Ceres SEQ ID NO 15174315 as cited in SEQ ID NO 0

SEQ ID NO: 119357 - protein, 149 aa, Arabidopsis thaliana; identical to SEQ ID NO: 108118
  peptide (1)..(149): Ceres Seq. ID no. 13653233

SEQ ID NO: 119358 - protein, 146 aa, Arabidopsis thaliana; identical to SEQ ID NO: 108119
  peptide (1)..(146): Ceres Seq. ID no. 13653234

SEQ ID NO: 119359 - protein, 134 aa, Arabidopsis thaliana; identical to SEQ ID NO: 108120
  peptide (1)..(134): Ceres Seq. ID no. 13653235

SEQ ID NO: 119360 - DNA, 1220 bp, Arabidopsis thaliana; identical to SEQ ID NO: 108121
  misc_feature (1)..(1220): Ceres Seq. ID no. 13653252
  misc_feature (1)..(1220): Ortholog of  Ceres SEQ ID NO 15225703 as cited in SEQ ID NO 59527
  misc_feature (1)..(1220): Ortholog of  Ceres SEQ ID NO 12615972 as cited in SEQ ID NO 62455
  misc_feature (1)..(1220): Ortholog of  Ceres SEQ ID NO 13596229 as cited in SEQ ID NO 68800
  misc_feature (1)..(1220): Ortholog of  Ceres SEQ ID NO 15179393 as cited in SEQ ID NO 0

SEQ ID NO: 119361 - protein, 317 aa, Arabidopsis thaliana; identical to SEQ ID NO: 22106
  peptide (1)..(317): Ceres Seq. ID no. 13653253

SEQ ID NO: 119362 - protein, 267 aa, Arabidopsis thaliana; identical to SEQ ID NO: 22107
  peptide (1)..(267): Ceres Seq. ID no. 13653254

SEQ ID NO: 119363 - protein, 222 aa, Arabidopsis thaliana; identical to SEQ ID NO: 22108
  peptide (1)..(222): Ceres Seq. ID no. 13653255

SEQ ID NO: 119364 - DNA, 1880 bp, Arabidopsis thaliana; identical to SEQ ID NO: 108125
  misc_feature (1)..(1880): Ceres Seq. ID no. 13653256
  misc_feature (1)..(1880): Ortholog of  Ceres SEQ ID NO 14307424 as cited in SEQ ID NO 54228
  misc_feature (1)..(1880): Ortholog of  Ceres SEQ ID NO 13664279 as cited in SEQ ID NO 61603
  misc_feature (1)..(1880): Ortholog of  Ceres SEQ ID NO 13584254 as cited in SEQ ID NO 63465

SEQ ID NO: 119365 - protein, 251 aa, Arabidopsis thaliana; identical to SEQ ID NO: 108126
  peptide (1)..(251): Ceres Seq. ID no. 13653257

SEQ ID NO: 119366 - protein, 166 aa, Arabidopsis thaliana; identical to SEQ ID NO: 108127
  peptide (1)..(166): Ceres Seq. ID no. 13653258

SEQ ID NO: 119367 - DNA, 3064 bp, Arabidopsis thaliana; identical to SEQ ID NO: 108128
  misc_feature (1)..(3064): Ceres Seq. ID no. 13653281
  misc_feature (1)..(3064): Ortholog of  Ceres SEQ ID NO 13597407 as cited in SEQ ID NO 64106
  misc_feature (1)..(3064): Ortholog of  Ceres SEQ ID NO 15180690 as cited in SEQ ID NO 0

SEQ ID NO: 119368 - protein, 443 aa, Arabidopsis thaliana; identical to SEQ ID NO: 108129
  peptide (1)..(443): Ceres Seq. ID no. 13653282

SEQ ID NO: 119369 - protein, 402 aa, Arabidopsis thaliana; identical to SEQ ID NO: 108130
  peptide (1)..(402): Ceres Seq. ID no. 13653283

SEQ ID NO: 119370 - protein, 376 aa, Arabidopsis thaliana; identical to SEQ ID NO: 48003
  peptide (1)..(376): Ceres Seq. ID no. 13653284

SEQ ID NO: 119371 - DNA, 1695 bp, Arabidopsis thaliana; identical to SEQ ID NO: 108132
  misc_feature (1)..(1695): Ceres Seq. ID no. 13653297
  misc_feature (1)..(1695): Ortholog of  Ceres SEQ ID NO 14304034 as cited in SEQ ID NO 53878
  misc_feature (1)..(1695): Ortholog of  Ceres SEQ ID NO 15171520 as cited in SEQ ID NO 60477

SEQ ID NO: 119372 - protein, 483 aa, Arabidopsis thaliana; identical to SEQ ID NO: 108133
  peptide (1)..(483): Ceres Seq. ID no. 13653298

SEQ ID NO: 119373 - protein, 364 aa, Arabidopsis thaliana; identical to SEQ ID NO: 108134
  peptide (1)..(364): Ceres Seq. ID no. 13653299

SEQ ID NO: 119374 - protein, 357 aa, Arabidopsis thaliana; identical to SEQ ID NO: 108135
  peptide (1)..(357): Ceres Seq. ID no. 13653300

SEQ ID NO: 119375 - DNA, 1027 bp, Arabidopsis thaliana; identical to SEQ ID NO: 108136
  misc_feature (1)..(1027): Ceres Seq. ID no. 13653301
  misc_feature (1)..(1027): Ortholog of  Ceres SEQ ID NO 14316060 as cited in SEQ ID NO 52465
  misc_feature (1)..(1027): Ortholog of  Ceres SEQ ID NO 13664032 as cited in SEQ ID NO 67527

SEQ ID NO: 119376 - protein, 205 aa, Arabidopsis thaliana; identical to SEQ ID NO: 108137
  peptide (1)..(205): Ceres Seq. ID no. 13653302

SEQ ID NO: 119377 - protein, 200 aa, Arabidopsis thaliana; identical to SEQ ID NO: 108138
  peptide (1)..(200): Ceres Seq. ID no. 13653303

SEQ ID NO: 119378 - protein, 172 aa, Arabidopsis thaliana; identical to SEQ ID NO: 108139
  peptide (1)..(172): Ceres Seq. ID no. 13653304

SEQ ID NO: 119379 - DNA, 3642 bp, Arabidopsis thaliana; identical to SEQ ID NO: 108140
  misc_feature (1)..(3642): Ceres Seq. ID no. 13653313
  misc_feature (1)..(3642): Ortholog of  Ceres SEQ ID NO 14313620 as cited in SEQ ID NO 54969

SEQ ID NO: 119380 - protein, 1176 aa, Arabidopsis thaliana; identical to SEQ ID NO: 108141
  peptide (1)..(1176): Ceres Seq. ID no. 13653314

SEQ ID NO: 119381 - protein, 1004 aa, Arabidopsis thaliana; identical to SEQ ID NO: 108142
  peptide (1)..(1004): Ceres Seq. ID no. 13653315

SEQ ID NO: 119382 - protein, 977 aa, Arabidopsis thaliana; identical to SEQ ID NO: 108143
  peptide (1)..(977): Ceres Seq. ID no. 13653316

SEQ ID NO: 119383 - DNA, 1780 bp, Arabidopsis thaliana; identical to SEQ ID NO: 108144
  misc_feature (1)..(1780): Ceres Seq. ID no. 13653325
  misc_feature (1)..(1780): Ortholog of  Ceres SEQ ID NO 13656435 as cited in SEQ ID NO 65853

SEQ ID NO: 119384 - protein, 437 aa, Arabidopsis thaliana; identical to SEQ ID NO: 50096
  peptide (1)..(437): Ceres Seq. ID no. 13653326

SEQ ID NO: 119385 - protein, 422 aa, Arabidopsis thaliana; identical to SEQ ID NO: 50097
  peptide (1)..(422): Ceres Seq. ID no. 13653327

SEQ ID NO: 119386 - protein, 262 aa, Arabidopsis thaliana; identical to SEQ ID NO: 50098
  peptide (1)..(262): Ceres Seq. ID no. 13653328

SEQ ID NO: 119387 - DNA, 1646 bp, Arabidopsis thaliana; identical to SEQ ID NO: 108148
  misc_feature (1)..(1646): Ceres Seq. ID no. 13653340
  misc_feature (1)..(1646): Ortholog of  Ceres SEQ ID NO 14303790 as cited in SEQ ID NO 55525

SEQ ID NO: 119388 - protein, 285 aa, Arabidopsis thaliana; identical to SEQ ID NO: 108149
  peptide (1)..(285): Ceres Seq. ID no. 13653341

SEQ ID NO: 119389 - protein, 281 aa, Arabidopsis thaliana; identical to SEQ ID NO: 108150
  peptide (1)..(281): Ceres Seq. ID no. 13653342

SEQ ID NO: 119390 - protein, 210 aa, Arabidopsis thaliana; identical to SEQ ID NO: 108151
  peptide (1)..(210): Ceres Seq. ID no. 13653343

SEQ ID NO: 119391 - DNA, 735 bp, Arabidopsis thaliana; identical to SEQ ID NO: 108152
  misc_feature (1)..(735): Ceres Seq. ID no. 13653364
  misc_feature (1)..(735): Ortholog of  Ceres SEQ ID NO 12610679 as cited in SEQ ID NO 56077

SEQ ID NO: 119392 - protein, 50 aa, Arabidopsis thaliana; identical to SEQ ID NO: 108153
  peptide (1)..(50): Ceres Seq. ID no. 13653365

SEQ ID NO: 119393 - protein, 45 aa, Arabidopsis thaliana; identical to SEQ ID NO: 108154
  peptide (1)..(45): Ceres Seq. ID no. 13653366

SEQ ID NO: 119394 - DNA, 1729 bp, Arabidopsis thaliana; identical to SEQ ID NO: 108155
  misc_feature (1)..(1729): Ceres Seq. ID no. 13653367
  misc_feature (1)..(1729): Ortholog of  Ceres SEQ ID NO 13594349 as cited in SEQ ID NO 58161
  misc_feature (1)..(1729): Ortholog of  Ceres SEQ ID NO 13663419 as cited in SEQ ID NO 66561
  misc_feature (1)..(1729): Ortholog of  Ceres SEQ ID NO 15177892 as cited in SEQ ID NO 0

SEQ ID NO: 119395 - protein, 427 aa, Arabidopsis thaliana; identical to SEQ ID NO: 108156
  peptide (1)..(427): Ceres Seq. ID no. 13653368

SEQ ID NO: 119396 - protein, 424 aa, Arabidopsis thaliana; identical to SEQ ID NO: 108157
  peptide (1)..(424): Ceres Seq. ID no. 13653369

SEQ ID NO: 119397 - protein, 420 aa, Arabidopsis thaliana; identical to SEQ ID NO: 108158
  peptide (1)..(420): Ceres Seq. ID no. 13653370

SEQ ID NO: 119398 - DNA, 1151 bp, Arabidopsis thaliana; identical to SEQ ID NO: 108159
  misc_feature (1)..(1151): Ceres Seq. ID no. 13653371
  misc_feature (1)..(1151): Ortholog of  Ceres SEQ ID NO 12558659 as cited in SEQ ID NO 20727
  misc_feature (1)..(1151): Ortholog of  Ceres SEQ ID NO 14308640 as cited in SEQ ID NO 60489
  misc_feature (1)..(1151): Ortholog of  Ceres SEQ ID NO 13656436 as cited in SEQ ID NO 69154

SEQ ID NO: 119399 - protein, 214 aa, Arabidopsis thaliana; identical to SEQ ID NO: 27745
  peptide (1)..(214): Ceres Seq. ID no. 13653372

SEQ ID NO: 119400 - DNA, 834 bp, Arabidopsis thaliana; identical to SEQ ID NO: 108161
  misc_feature (1)..(834): Ceres Seq. ID no. 13653389
  misc_feature (1)..(834): Ortholog of  Ceres SEQ ID NO 13594974 as cited in SEQ ID NO 56010
  misc_feature (1)..(834): Ortholog of  Ceres SEQ ID NO 13661512 as cited in SEQ ID NO 61464

SEQ ID NO: 119401 - protein, 210 aa, Arabidopsis thaliana; identical to SEQ ID NO: 108162
  peptide (1)..(210): Ceres Seq. ID no. 13653390

SEQ ID NO: 119402 - protein, 154 aa, Arabidopsis thaliana; identical to SEQ ID NO: 36976
  peptide (1)..(154): Ceres Seq. ID no. 13653391

SEQ ID NO: 119403 - protein, 143 aa, Arabidopsis thaliana; identical to SEQ ID NO: 36977
  peptide (1)..(143): Ceres Seq. ID no. 13653392

SEQ ID NO: 119404 - DNA, 1042 bp, Arabidopsis thaliana; identical to SEQ ID NO: 108165
  misc_feature (1)..(1042): Ceres Seq. ID no. 13653397
  misc_feature (1)..(1042): Ortholog of  Ceres SEQ ID NO 12635162 as cited in SEQ ID NO 0

SEQ ID NO: 119405 - protein, 201 aa, Arabidopsis thaliana; identical to SEQ ID NO: 23283
  peptide (1)..(201): Ceres Seq. ID no. 13653398

SEQ ID NO: 119406 - DNA, 1257 bp, Arabidopsis thaliana; identical to SEQ ID NO: 108167
  misc_feature (1)..(1257): Ceres Seq. ID no. 13653399
  misc_feature (1)..(1257): Ortholog of  Ceres SEQ ID NO 13597019 as cited in SEQ ID NO 64303
  misc_feature (1)..(1257): Ortholog of  Ceres SEQ ID NO 13654191 as cited in SEQ ID NO 68235

SEQ ID NO: 119407 - protein, 320 aa, Arabidopsis thaliana; identical to SEQ ID NO: 36403
  peptide (1)..(320): Ceres Seq. ID no. 13653400

SEQ ID NO: 119408 - protein, 196 aa, Arabidopsis thaliana; identical to SEQ ID NO: 36404
  peptide (1)..(196): Ceres Seq. ID no. 13653401

SEQ ID NO: 119409 - protein, 183 aa, Arabidopsis thaliana; identical to SEQ ID NO: 36405
  peptide (1)..(183): Ceres Seq. ID no. 13653402

SEQ ID NO: 119410 - DNA, 1534 bp, Arabidopsis thaliana; identical to SEQ ID NO: 108171
  misc_feature (1)..(1534): Ceres Seq. ID no. 13653403
  misc_feature (1)..(1534): Ortholog of  Ceres SEQ ID NO 14312216 as cited in SEQ ID NO 53930
  misc_feature (1)..(1534): Ortholog of  Ceres SEQ ID NO 13656404 as cited in SEQ ID NO 65806
  misc_feature (1)..(1534): Ortholog of  Ceres SEQ ID NO 12779935 as cited in SEQ ID NO 66774
  misc_feature (1)..(1534): Ortholog of  Ceres SEQ ID NO 13598695 as cited in SEQ ID NO 67368
  misc_feature (1)..(1534): Ortholog of  Ceres SEQ ID NO 13591174 as cited in SEQ ID NO 68289

SEQ ID NO: 119411 - protein, 441 aa, Arabidopsis thaliana; identical to SEQ ID NO: 108172
  peptide (1)..(441): Ceres Seq. ID no. 13653404

SEQ ID NO: 119412 - protein, 419 aa, Arabidopsis thaliana; identical to SEQ ID NO: 108173
  peptide (1)..(419): Ceres Seq. ID no. 13653405

SEQ ID NO: 119413 - protein, 372 aa, Arabidopsis thaliana; identical to SEQ ID NO: 108174
  peptide (1)..(372): Ceres Seq. ID no. 13653406

SEQ ID NO: 119414 - DNA, 1347 bp, Arabidopsis thaliana; identical to SEQ ID NO: 108175
  misc_feature (1)..(1347): Ceres Seq. ID no. 13653407
  misc_feature (1)..(1347): Ortholog of  Ceres SEQ ID NO 13645078 as cited in SEQ ID NO 51158

SEQ ID NO: 119415 - protein, 390 aa, Arabidopsis thaliana; identical to SEQ ID NO: 23529
  peptide (1)..(390): Ceres Seq. ID no. 13653408

SEQ ID NO: 119416 - protein, 338 aa, Arabidopsis thaliana; identical to SEQ ID NO: 23530
  peptide (1)..(338): Ceres Seq. ID no. 13653409

SEQ ID NO: 119417 - protein, 307 aa, Arabidopsis thaliana; identical to SEQ ID NO: 85900
  peptide (1)..(307): Ceres Seq. ID no. 13653410

SEQ ID NO: 119418 - DNA, 1240 bp, Arabidopsis thaliana; identical to SEQ ID NO: 108179
  misc_feature (1)..(1240): Ceres Seq. ID no. 13653414
  misc_feature (1)..(1240): Ortholog of  Ceres SEQ ID NO 14316382 as cited in SEQ ID NO 57756

SEQ ID NO: 119419 - protein, 348 aa, Arabidopsis thaliana; identical to SEQ ID NO: 108180
  peptide (1)..(348): Ceres Seq. ID no. 13653415

SEQ ID NO: 119420 - protein, 289 aa, Arabidopsis thaliana; identical to SEQ ID NO: 108181
  peptide (1)..(289): Ceres Seq. ID no. 13653416

SEQ ID NO: 119421 - protein, 285 aa, Arabidopsis thaliana; identical to SEQ ID NO: 108182
  peptide (1)..(285): Ceres Seq. ID no. 13653417

SEQ ID NO: 119422 - DNA, 1393 bp, Arabidopsis thaliana; identical to SEQ ID NO: 108183
  misc_feature (1)..(1393): Ceres Seq. ID no. 13653422
  misc_feature (1)..(1393): Ortholog of  Ceres SEQ ID NO 14314925 as cited in SEQ ID NO 57985
  misc_feature (1)..(1393): Ortholog of  Ceres SEQ ID NO 13591365 as cited in SEQ ID NO 62720

SEQ ID NO: 119423 - protein, 271 aa, Arabidopsis thaliana; identical to SEQ ID NO: 22581
  peptide (1)..(271): Ceres Seq. ID no. 13653423

SEQ ID NO: 119424 - protein, 268 aa, Arabidopsis thaliana; identical to SEQ ID NO: 22582
  peptide (1)..(268): Ceres Seq. ID no. 13653424

SEQ ID NO: 119425 - protein, 240 aa, Arabidopsis thaliana; identical to SEQ ID NO: 108186
  peptide (1)..(240): Ceres Seq. ID no. 13653425

SEQ ID NO: 119426 - DNA, 1828 bp, Arabidopsis thaliana; identical to SEQ ID NO: 108187
  misc_feature (1)..(1828): Ceres Seq. ID no. 13653430
  misc_feature (1)..(1828): Ortholog of  Ceres SEQ ID NO 12613725 as cited in SEQ ID NO 68196

SEQ ID NO: 119427 - protein, 302 aa, Arabidopsis thaliana; identical to SEQ ID NO: 108188
  peptide (1)..(302): Ceres Seq. ID no. 13653431

SEQ ID NO: 119428 - protein, 269 aa, Arabidopsis thaliana; identical to SEQ ID NO: 108189
  peptide (1)..(269): Ceres Seq. ID no. 13653432

SEQ ID NO: 119429 - protein, 213 aa, Arabidopsis thaliana; identical to SEQ ID NO: 108190
  peptide (1)..(213): Ceres Seq. ID no. 13653433

SEQ ID NO: 119430 - DNA, 1386 bp, Arabidopsis thaliana; identical to SEQ ID NO: 108191
  misc_feature (1)..(1386): Ceres Seq. ID no. 13653434
  misc_feature (1)..(1386): Ortholog of  Ceres SEQ ID NO 14313264 as cited in SEQ ID NO 67300
  misc_feature (1)..(1386): Ortholog of  Ceres SEQ ID NO 14302824 as cited in SEQ ID NO 67794

SEQ ID NO: 119431 - protein, 368 aa, Arabidopsis thaliana; identical to SEQ ID NO: 86968
  peptide (1)..(368): Ceres Seq. ID no. 13653435

SEQ ID NO: 119432 - protein, 339 aa, Arabidopsis thaliana; identical to SEQ ID NO: 86969
  peptide (1)..(339): Ceres Seq. ID no. 13653436

SEQ ID NO: 119433 - protein, 308 aa, Arabidopsis thaliana; identical to SEQ ID NO: 86970
  peptide (1)..(308): Ceres Seq. ID no. 13653437

SEQ ID NO: 119434 - DNA, 1380 bp, Arabidopsis thaliana; identical to SEQ ID NO: 108195
  misc_feature (1)..(1380): Ceres Seq. ID no. 13653446
  misc_feature (1)..(1380): Ortholog of  Ceres SEQ ID NO 14304120 as cited in SEQ ID NO 58862
  misc_feature (1)..(1380): Ortholog of  Ceres SEQ ID NO 13595658 as cited in SEQ ID NO 59888
  misc_feature (1)..(1380): Ortholog of  Ceres SEQ ID NO 13661330 as cited in SEQ ID NO 61614
  misc_feature (1)..(1380): Ortholog of  Ceres SEQ ID NO 13596025 as cited in SEQ ID NO 62024
  misc_feature (1)..(1380): Ortholog of  Ceres SEQ ID NO 13662324 as cited in SEQ ID NO 62162
  misc_feature (1)..(1380): Ortholog of  Ceres SEQ ID NO 12625713 as cited in SEQ ID NO 64160
  misc_feature (1)..(1380): Ortholog of  Ceres SEQ ID NO 14303564 as cited in SEQ ID NO 65360
  misc_feature (1)..(1380): Ortholog of  Ceres SEQ ID NO 15170103 as cited in SEQ ID NO 66345
  misc_feature (1)..(1380): Ortholog of  Ceres SEQ ID NO 14313495 as cited in SEQ ID NO 0
  misc_feature (1)..(1380): Ortholog of  Ceres SEQ ID NO 15174373 as cited in SEQ ID NO 0

SEQ ID NO: 119435 - protein, 299 aa, Arabidopsis thaliana; identical to SEQ ID NO: 46829
  peptide (1)..(299): Ceres Seq. ID no. 13653447

SEQ ID NO: 119436 - protein, 182 aa, Arabidopsis thaliana; identical to SEQ ID NO: 46830
  peptide (1)..(182): Ceres Seq. ID no. 13653448

SEQ ID NO: 119437 - DNA, 3148 bp, Arabidopsis thaliana; identical to SEQ ID NO: 108198
  misc_feature (1)..(3148): Ceres Seq. ID no. 13653453
  misc_feature (1)..(3148): Ortholog of  Ceres SEQ ID NO 14314423 as cited in SEQ ID NO 52352

SEQ ID NO: 119438 - protein, 526 aa, Arabidopsis thaliana; identical to SEQ ID NO: 108199
  peptide (1)..(526): Ceres Seq. ID no. 13653454

SEQ ID NO: 119439 - protein, 520 aa, Arabidopsis thaliana; identical to SEQ ID NO: 108200
  peptide (1)..(520): Ceres Seq. ID no. 13653455

SEQ ID NO: 119440 - protein, 425 aa, Arabidopsis thaliana; identical to SEQ ID NO: 108201
  peptide (1)..(425): Ceres Seq. ID no. 13653456

SEQ ID NO: 119441 - DNA, 1576 bp, Arabidopsis thaliana; identical to SEQ ID NO: 108202
  misc_feature (1)..(1576): Ceres Seq. ID no. 13653457
  misc_feature (1)..(1576): Ortholog of  Ceres SEQ ID NO 14314896 as cited in SEQ ID NO 54010
  misc_feature (1)..(1576): Ortholog of  Ceres SEQ ID NO 14308813 as cited in SEQ ID NO 55485
  misc_feature (1)..(1576): Ortholog of  Ceres SEQ ID NO 13655744 as cited in SEQ ID NO 64032
  misc_feature (1)..(1576): Ortholog of  Ceres SEQ ID NO 13590394 as cited in SEQ ID NO 66581

SEQ ID NO: 119442 - protein, 470 aa, Arabidopsis thaliana; identical to SEQ ID NO: 40875
  peptide (1)..(470): Ceres Seq. ID no. 13653458

SEQ ID NO: 119443 - protein, 449 aa, Arabidopsis thaliana; identical to SEQ ID NO: 27284
  peptide (1)..(449): Ceres Seq. ID no. 13653459

SEQ ID NO: 119444 - protein, 401 aa, Arabidopsis thaliana; identical to SEQ ID NO: 21437
  peptide (1)..(401): Ceres Seq. ID no. 13653460

SEQ ID NO: 119445 - DNA, 899 bp, Arabidopsis thaliana; identical to SEQ ID NO: 108206
  misc_feature (1)..(899): Ceres Seq. ID no. 13653481
  misc_feature (1)..(899): Ortholog of  Ceres SEQ ID NO 13594248 as cited in SEQ ID NO 57340

SEQ ID NO: 119446 - protein, 254 aa, Arabidopsis thaliana; identical to SEQ ID NO: 108207
  peptide (1)..(254): Ceres Seq. ID no. 13653482

SEQ ID NO: 119447 - protein, 236 aa, Arabidopsis thaliana; identical to SEQ ID NO: 26577
  peptide (1)..(236): Ceres Seq. ID no. 13653483

SEQ ID NO: 119448 - protein, 230 aa, Arabidopsis thaliana; identical to SEQ ID NO: 26578
  peptide (1)..(230): Ceres Seq. ID no. 13653484

SEQ ID NO: 119449 - DNA, 835 bp, Arabidopsis thaliana; identical to SEQ ID NO: 108210
  misc_feature (1)..(835): Ceres Seq. ID no. 13653493
  misc_feature (1)..(835): Ortholog of  Ceres SEQ ID NO 13597058 as cited in SEQ ID NO 63499

SEQ ID NO: 119450 - protein, 190 aa, Arabidopsis thaliana; identical to SEQ ID NO: 21979
  peptide (1)..(190): Ceres Seq. ID no. 13653494

SEQ ID NO: 119451 - protein, 165 aa, Arabidopsis thaliana; identical to SEQ ID NO: 21980
  peptide (1)..(165): Ceres Seq. ID no. 13653495

SEQ ID NO: 119452 - DNA, 757 bp, Arabidopsis thaliana; identical to SEQ ID NO: 108213
  misc_feature (1)..(757): Ceres Seq. ID no. 13653508
  misc_feature (1)..(757): Ortholog of  Ceres SEQ ID NO 12624607 as cited in SEQ ID NO 61454

SEQ ID NO: 119453 - protein, 163 aa, Arabidopsis thaliana; identical to SEQ ID NO: 108214
  peptide (1)..(163): Ceres Seq. ID no. 13653509

SEQ ID NO: 119454 - protein, 157 aa, Arabidopsis thaliana; identical to SEQ ID NO: 108215
  peptide (1)..(157): Ceres Seq. ID no. 13653510

SEQ ID NO: 119455 - protein, 156 aa, Arabidopsis thaliana; identical to SEQ ID NO: 108216
  peptide (1)..(156): Ceres Seq. ID no. 13653511

SEQ ID NO: 119456 - DNA, 3308 bp, Arabidopsis thaliana; identical to SEQ ID NO: 108217
  misc_feature (1)..(3308): Ceres Seq. ID no. 13653524
  misc_feature (1)..(3308): Ortholog of  Ceres SEQ ID NO 13648124 as cited in SEQ ID NO 20362

SEQ ID NO: 119457 - protein, 920 aa, Arabidopsis thaliana; identical to SEQ ID NO: 108218
  peptide (1)..(920): Ceres Seq. ID no. 13653525

SEQ ID NO: 119458 - protein, 858 aa, Arabidopsis thaliana; identical to SEQ ID NO: 108219
  peptide (1)..(858): Ceres Seq. ID no. 13653526

SEQ ID NO: 119459 - protein, 826 aa, Arabidopsis thaliana; identical to SEQ ID NO: 108220
  peptide (1)..(826): Ceres Seq. ID no. 13653527

SEQ ID NO: 119460 - DNA, 1678 bp, Arabidopsis thaliana; identical to SEQ ID NO: 108221
  misc_feature (1)..(1678): Ceres Seq. ID no. 13653555
  misc_feature (1)..(1678): Ortholog of  Ceres SEQ ID NO 13581273 as cited in SEQ ID NO 54551
  misc_feature (1)..(1678): Ortholog of  Ceres SEQ ID NO 13594209 as cited in SEQ ID NO 59089
  misc_feature (1)..(1678): Ortholog of  Ceres SEQ ID NO 14306857 as cited in SEQ ID NO 60035
  misc_feature (1)..(1678): Ortholog of  Ceres SEQ ID NO 14307960 as cited in SEQ ID NO 66187
  misc_feature (1)..(1678): Ortholog of  Ceres SEQ ID NO 13502874 as cited in SEQ ID NO 66298
  misc_feature (1)..(1678): Ortholog of  Ceres SEQ ID NO 12614124 as cited in SEQ ID NO 68392

SEQ ID NO: 119461 - protein, 504 aa, Arabidopsis thaliana; identical to SEQ ID NO: 108222
  peptide (1)..(504): Ceres Seq. ID no. 13653556

SEQ ID NO: 119462 - protein, 495 aa, Arabidopsis thaliana; identical to SEQ ID NO: 50488
  peptide (1)..(495): Ceres Seq. ID no. 13653557

SEQ ID NO: 119463 - protein, 390 aa, Arabidopsis thaliana; identical to SEQ ID NO: 50489
  peptide (1)..(390): Ceres Seq. ID no. 13653558

SEQ ID NO: 119464 - DNA, 1200 bp, Arabidopsis thaliana; identical to SEQ ID NO: 108225
  misc_feature (1)..(1200): Ceres Seq. ID no. 13653559
  misc_feature (1)..(1200): Ortholog of  Ceres SEQ ID NO 15178317 as cited in SEQ ID NO 52489
  misc_feature (1)..(1200): Ortholog of  Ceres SEQ ID NO 14314415 as cited in SEQ ID NO 57442

SEQ ID NO: 119465 - protein, 263 aa, Arabidopsis thaliana; identical to SEQ ID NO: 38728
  peptide (1)..(263): Ceres Seq. ID no. 13653560

SEQ ID NO: 119466 - protein, 255 aa, Arabidopsis thaliana; identical to SEQ ID NO: 38729
  peptide (1)..(255): Ceres Seq. ID no. 13653561

SEQ ID NO: 119467 - protein, 187 aa, Arabidopsis thaliana; identical to SEQ ID NO: 38730
  peptide (1)..(187): Ceres Seq. ID no. 13653562

SEQ ID NO: 119468 - DNA, 1062 bp, Arabidopsis thaliana; identical to SEQ ID NO: 108229
  misc_feature (1)..(1062): Ceres Seq. ID no. 13653563
  misc_feature (1)..(1062): Ortholog of  Ceres SEQ ID NO 13600601 as cited in SEQ ID NO 497
  misc_feature (1)..(1062): Ortholog of  Ceres SEQ ID NO 13664283 as cited in SEQ ID NO 61283
  misc_feature (1)..(1062): Ortholog of  Ceres SEQ ID NO 12635513 as cited in SEQ ID NO 0
  misc_feature (1)..(1062): Ortholog of  Ceres SEQ ID NO 12635723 as cited in SEQ ID NO 0

SEQ ID NO: 119469 - protein, 270 aa, Arabidopsis thaliana; identical to SEQ ID NO: 108230
  peptide (1)..(270): Ceres Seq. ID no. 13653564

SEQ ID NO: 119470 - protein, 230 aa, Arabidopsis thaliana; identical to SEQ ID NO: 36595
  peptide (1)..(230): Ceres Seq. ID no. 13653565

SEQ ID NO: 119471 - protein, 156 aa, Arabidopsis thaliana; identical to SEQ ID NO: 36596
  peptide (1)..(156): Ceres Seq. ID no. 13653566

SEQ ID NO: 119472 - DNA, 1189 bp, Arabidopsis thaliana; identical to SEQ ID NO: 108233
  misc_feature (1)..(1189): Ceres Seq. ID no. 13653567
  misc_feature (1)..(1189): Ortholog of  Ceres SEQ ID NO 14315028 as cited in SEQ ID NO 57989

SEQ ID NO: 119473 - protein, 237 aa, Arabidopsis thaliana; identical to SEQ ID NO: 108234
  peptide (1)..(237): Ceres Seq. ID no. 13653568

SEQ ID NO: 119474 - protein, 236 aa, Arabidopsis thaliana; identical to SEQ ID NO: 108235
  peptide (1)..(236): Ceres Seq. ID no. 13653569

SEQ ID NO: 119475 - protein, 209 aa, Arabidopsis thaliana; identical to SEQ ID NO: 108236
  peptide (1)..(209): Ceres Seq. ID no. 13653570

SEQ ID NO: 119476 - DNA, 1684 bp, Arabidopsis thaliana; identical to SEQ ID NO: 108237
  misc_feature (1)..(1684): Ceres Seq. ID no. 13653579
  misc_feature (1)..(1684): Ortholog of  Ceres SEQ ID NO 13654989 as cited in SEQ ID NO 63117
  misc_feature (1)..(1684): Ortholog of  Ceres SEQ ID NO 13657138 as cited in SEQ ID NO 65923
  misc_feature (1)..(1684): Ortholog of  Ceres SEQ ID NO 13584744 as cited in SEQ ID NO 69137

SEQ ID NO: 119477 - protein, 321 aa, Arabidopsis thaliana; identical to SEQ ID NO: 108238
  peptide (1)..(321): Ceres Seq. ID no. 13653580

SEQ ID NO: 119478 - protein, 265 aa, Arabidopsis thaliana; identical to SEQ ID NO: 108239
  peptide (1)..(265): Ceres Seq. ID no. 13653581

SEQ ID NO: 119479 - protein, 180 aa, Arabidopsis thaliana; identical to SEQ ID NO: 108240
  peptide (1)..(180): Ceres Seq. ID no. 13653582

SEQ ID NO: 119480 - DNA, 1727 bp, Arabidopsis thaliana; identical to SEQ ID NO: 108241
  misc_feature (1)..(1727): Ceres Seq. ID no. 13653602
  misc_feature (1)..(1727): Ortholog of  Ceres SEQ ID NO 13596034 as cited in SEQ ID NO 62066

SEQ ID NO: 119481 - protein, 309 aa, Arabidopsis thaliana; identical to SEQ ID NO: 108242
  peptide (1)..(309): Ceres Seq. ID no. 13653603

SEQ ID NO: 119482 - protein, 265 aa, Arabidopsis thaliana; identical to SEQ ID NO: 108243
  peptide (1)..(265): Ceres Seq. ID no. 13653604

SEQ ID NO: 119483 - DNA, 1125 bp, Arabidopsis thaliana; identical to SEQ ID NO: 108244
  misc_feature (1)..(1125): Ceres Seq. ID no. 13653617
  misc_feature (1)..(1125): Ortholog of  Ceres SEQ ID NO 14303542 as cited in SEQ ID NO 63539
  misc_feature (1)..(1125): Ortholog of  Ceres SEQ ID NO 12407937 as cited in SEQ ID NO 0

SEQ ID NO: 119484 - protein, 330 aa, Arabidopsis thaliana; identical to SEQ ID NO: 46533
  peptide (1)..(330): Ceres Seq. ID no. 13653618

SEQ ID NO: 119485 - protein, 322 aa, Arabidopsis thaliana; identical to SEQ ID NO: 46534
  peptide (1)..(322): Ceres Seq. ID no. 13653619

SEQ ID NO: 119486 - protein, 279 aa, Arabidopsis thaliana; identical to SEQ ID NO: 108247
  peptide (1)..(279): Ceres Seq. ID no. 13653620

SEQ ID NO: 119487 - DNA, 1660 bp, Arabidopsis thaliana; identical to SEQ ID NO: 108248
  misc_feature (1)..(1660): Ceres Seq. ID no. 13653621
  misc_feature (1)..(1660): Ortholog of  Ceres SEQ ID NO 14310841 as cited in SEQ ID NO 53666
  misc_feature (1)..(1660): Ortholog of  Ceres SEQ ID NO 15178736 as cited in SEQ ID NO 56439

SEQ ID NO: 119488 - protein, 527 aa, Arabidopsis thaliana; identical to SEQ ID NO: 29071
  peptide (1)..(527): Ceres Seq. ID no. 13653622

SEQ ID NO: 119489 - protein, 507 aa, Arabidopsis thaliana; identical to SEQ ID NO: 29072
  peptide (1)..(507): Ceres Seq. ID no. 13653623

SEQ ID NO: 119490 - protein, 500 aa, Arabidopsis thaliana; identical to SEQ ID NO: 29073
  peptide (1)..(500): Ceres Seq. ID no. 13653624

SEQ ID NO: 119491 - DNA, 2486 bp, Arabidopsis thaliana; identical to SEQ ID NO: 108252
  misc_feature (1)..(2486): Ceres Seq. ID no. 13653652
  misc_feature (1)..(2486): Ortholog of  Ceres SEQ ID NO 13599779 as cited in SEQ ID NO 0

SEQ ID NO: 119492 - protein, 754 aa, Arabidopsis thaliana; identical to SEQ ID NO: 108253
  peptide (1)..(754): Ceres Seq. ID no. 13653653

SEQ ID NO: 119493 - protein, 685 aa, Arabidopsis thaliana; identical to SEQ ID NO: 108254
  peptide (1)..(685): Ceres Seq. ID no. 13653654

SEQ ID NO: 119494 - protein, 646 aa, Arabidopsis thaliana; identical to SEQ ID NO: 108255
  peptide (1)..(646): Ceres Seq. ID no. 13653655

SEQ ID NO: 119495 - DNA, 1104 bp, Arabidopsis thaliana; identical to SEQ ID NO: 108256
  misc_feature (1)..(1104): Ceres Seq. ID no. 13653684
  misc_feature (1)..(1104): Ortholog of  Ceres SEQ ID NO 15169005 as cited in SEQ ID NO 55180

SEQ ID NO: 119496 - protein, 166 aa, Arabidopsis thaliana; identical to SEQ ID NO: 108257
  peptide (1)..(166): Ceres Seq. ID no. 13653685

SEQ ID NO: 119497 - protein, 150 aa, Arabidopsis thaliana; identical to SEQ ID NO: 108258
  peptide (1)..(150): Ceres Seq. ID no. 13653686

SEQ ID NO: 119498 - protein, 139 aa, Arabidopsis thaliana; identical to SEQ ID NO: 108259
  peptide (1)..(139): Ceres Seq. ID no. 13653687

SEQ ID NO: 119499 - protein, 117 aa, Arabidopsis thaliana; identical to SEQ ID NO: 108260
  peptide (1)..(117): Ceres Seq. ID no. 13653688

SEQ ID NO: 119500 - DNA, 650 bp, Arabidopsis thaliana; identical to SEQ ID NO: 108261
  misc_feature (1)..(650): Ceres Seq. ID no. 13653716
  misc_feature (1)..(650): Ortholog of  Ceres SEQ ID NO 15179206 as cited in SEQ ID NO 0

SEQ ID NO: 119501 - protein, 162 aa, Arabidopsis thaliana; identical to SEQ ID NO: 28061
  peptide (1)..(162): Ceres Seq. ID no. 13653717

SEQ ID NO: 119502 - DNA, 1027 bp, Arabidopsis thaliana; identical to SEQ ID NO: 108263
  misc_feature (1)..(1027): Ceres Seq. ID no. 13653718
  misc_feature (1)..(1027): Ortholog of  Ceres SEQ ID NO 12617080 as cited in SEQ ID NO 63943
  misc_feature (1)..(1027): Ortholog of  Ceres SEQ ID NO 13657621 as cited in SEQ ID NO 65802

SEQ ID NO: 119503 - protein, 268 aa, Arabidopsis thaliana; identical to SEQ ID NO: 101212
  peptide (1)..(268): Ceres Seq. ID no. 13653719

SEQ ID NO: 119504 - protein, 188 aa, Arabidopsis thaliana; identical to SEQ ID NO: 101213
  peptide (1)..(188): Ceres Seq. ID no. 13653720

SEQ ID NO: 119505 - protein, 142 aa, Arabidopsis thaliana; identical to SEQ ID NO: 101214
  peptide (1)..(142): Ceres Seq. ID no. 13653721

SEQ ID NO: 119506 - DNA, 1226 bp, Arabidopsis thaliana; identical to SEQ ID NO: 108267
  misc_feature (1)..(1226): Ceres Seq. ID no. 13653726
  misc_feature (1)..(1226): Ortholog of  Ceres SEQ ID NO 13598818 as cited in SEQ ID NO 0

SEQ ID NO: 119507 - protein, 313 aa, Arabidopsis thaliana; identical to SEQ ID NO: 108268
  peptide (1)..(313): Ceres Seq. ID no. 13653727

SEQ ID NO: 119508 - protein, 254 aa, Arabidopsis thaliana; identical to SEQ ID NO: 108269
  peptide (1)..(254): Ceres Seq. ID no. 13653728

SEQ ID NO: 119509 - protein, 248 aa, Arabidopsis thaliana; identical to SEQ ID NO: 108270
  peptide (1)..(248): Ceres Seq. ID no. 13653729

SEQ ID NO: 119510 - DNA, 595 bp, Arabidopsis thaliana; identical to SEQ ID NO: 108271
  misc_feature (1)..(595): Ceres Seq. ID no. 13653730
  misc_feature (1)..(595): Ortholog of  Ceres SEQ ID NO 15179191 as cited in SEQ ID NO 0

SEQ ID NO: 119511 - protein, 198 aa, Arabidopsis thaliana; identical to SEQ ID NO: 108272
  peptide (1)..(198): Ceres Seq. ID no. 13653731

SEQ ID NO: 119512 - protein, 188 aa, Arabidopsis thaliana; identical to SEQ ID NO: 108273
  peptide (1)..(188): Ceres Seq. ID no. 13653732

SEQ ID NO: 119513 - DNA, 3350 bp, Arabidopsis thaliana; identical to SEQ ID NO: 108274
  misc_feature (1)..(3350): Ceres Seq. ID no. 13653739
  misc_feature (1)..(3350): Ortholog of  Ceres SEQ ID NO 14315338 as cited in SEQ ID NO 60283

SEQ ID NO: 119514 - protein, 837 aa, Arabidopsis thaliana [sequence omitted]

SEQ ID NO: 119515 - protein, 564 aa, Arabidopsis thaliana; identical to SEQ ID NO: 108276
  peptide (1)..(564): Ceres Seq. ID no. 13653741

SEQ ID NO: 119516 - protein, 533 aa, Arabidopsis thaliana; identical to SEQ ID NO: 108277
  peptide (1)..(533): Ceres Seq. ID no. 13653742

SEQ ID NO: 119517 - DNA, 1540 bp, Arabidopsis thaliana; identical to SEQ ID NO: 108278
  misc_feature (1)..(1540): Ceres Seq. ID no. 13653743
  misc_feature (1)..(1540): Ortholog of  Ceres SEQ ID NO 14305540 as cited in SEQ ID NO 60089

SEQ ID NO: 119518 - protein, 215 aa, Arabidopsis thaliana; identical to SEQ ID NO: 108279
  peptide (1)..(215): Ceres Seq. ID no. 13653744

SEQ ID NO: 119519 - protein, 180 aa, Arabidopsis thaliana; identical to SEQ ID NO: 47567
  peptide (1)..(180): Ceres Seq. ID no. 13653745

SEQ ID NO: 119520 - protein, 162 aa, Arabidopsis thaliana; identical to SEQ ID NO: 47568
  peptide (1)..(162): Ceres Seq. ID no. 13653746

SEQ ID NO: 119521 - DNA, 2019 bp, Arabidopsis thaliana; identical to SEQ ID NO: 108282
  misc_feature (1)..(2019): Ceres Seq. ID no. 13653751
  misc_feature (1)..(2019): Ortholog of  Ceres SEQ ID NO 15169199 as cited in SEQ ID NO 55297
  misc_feature (1)..(2019): Ortholog of  Ceres SEQ ID NO 15171197 as cited in SEQ ID NO 56892
  misc_feature (1)..(2019): Ortholog of  Ceres SEQ ID NO 14306381 as cited in SEQ ID NO 58812

SEQ ID NO: 119522 - protein, 267 aa, Arabidopsis thaliana; identical to SEQ ID NO: 108283
  peptide (1)..(267): Ceres Seq. ID no. 13653752

SEQ ID NO: 119523 - protein, 182 aa, Arabidopsis thaliana; identical to SEQ ID NO: 108284
  peptide (1)..(182): Ceres Seq. ID no. 13653753

SEQ ID NO: 119524 - protein, 178 aa, Arabidopsis thaliana; identical to SEQ ID NO: 108285
  peptide (1)..(178): Ceres Seq. ID no. 13653754

SEQ ID NO: 119525 - DNA, 2042 bp, Arabidopsis thaliana; identical to SEQ ID NO: 108286
  misc_feature (1)..(2042): Ceres Seq. ID no. 13653755
  misc_feature (1)..(2042): Ortholog of  Ceres SEQ ID NO 15169603 as cited in SEQ ID NO 65772
  misc_feature (1)..(2042): Ortholog of  Ceres SEQ ID NO 14308003 as cited in SEQ ID NO 65919
  misc_feature (1)..(2042): Ortholog of  Ceres SEQ ID NO 14303087 as cited in SEQ ID NO 66569

SEQ ID NO: 119526 - protein, 567 aa, Arabidopsis thaliana; identical to SEQ ID NO: 108287
  peptide (1)..(567): Ceres Seq. ID no. 13653756

SEQ ID NO: 119527 - protein, 559 aa, Arabidopsis thaliana; identical to SEQ ID NO: 82609
  peptide (1)..(559): Ceres Seq. ID no. 13653757

SEQ ID NO: 119528 - protein, 490 aa, Arabidopsis thaliana; identical to SEQ ID NO: 82610
  peptide (1)..(490): Ceres Seq. ID no. 13653758

SEQ ID NO: 119529 - DNA, 802 bp, Arabidopsis thaliana; identical to SEQ ID NO: 108290
  misc_feature (1)..(802): Ceres Seq. ID no. 13653759
  misc_feature (1)..(802): Ortholog of  Ceres SEQ ID NO 13661939 as cited in SEQ ID NO 61170
  misc_feature (1)..(802): Ortholog of  Ceres SEQ ID NO 14309041 as cited in SEQ ID NO 0
  misc_feature (1)..(802): Ortholog of  Ceres SEQ ID NO 14309611 as cited in SEQ ID NO 0

SEQ ID NO: 119530 - protein, 176 aa, Arabidopsis thaliana; identical to SEQ ID NO: 101884
  peptide (1)..(176): Ceres Seq. ID no. 13653760

SEQ ID NO: 119531 - protein, 142 aa, Arabidopsis thaliana; identical to SEQ ID NO: 101885
  peptide (1)..(142): Ceres Seq. ID no. 13653761

SEQ ID NO: 119532 - DNA, 1055 bp, Arabidopsis thaliana; identical to SEQ ID NO: 108293
  misc_feature (1)..(1055): Ceres Seq. ID no. 13653766
  misc_feature (1)..(1055): Ortholog of  Ceres SEQ ID NO 15169372 as cited in SEQ ID NO 58778

SEQ ID NO: 119533 - protein, 321 aa, Arabidopsis thaliana; identical to SEQ ID NO: 102392
  peptide (1)..(321): Ceres Seq. ID no. 13653767

SEQ ID NO: 119534 - protein, 315 aa, Arabidopsis thaliana; identical to SEQ ID NO: 102393
  peptide (1)..(315): Ceres Seq. ID no. 13653768

SEQ ID NO: 119535 - protein, 267 aa, Arabidopsis thaliana; identical to SEQ ID NO: 108296
  peptide (1)..(267): Ceres Seq. ID no. 13653769

SEQ ID NO: 119536 - DNA, 1880 bp, Arabidopsis thaliana; identical to SEQ ID NO: 108297
  misc_feature (1)..(1880): Ceres Seq. ID no. 13653774
  misc_feature (1)..(1880): Ortholog of  Ceres SEQ ID NO 13594317 as cited in SEQ ID NO 57796

SEQ ID NO: 119537 - protein, 398 aa, Arabidopsis thaliana; identical to SEQ ID NO: 108298
  peptide (1)..(398): Ceres Seq. ID no. 13653775

SEQ ID NO: 119538 - protein, 281 aa, Arabidopsis thaliana; identical to SEQ ID NO: 108299
  peptide (1)..(281): Ceres Seq. ID no. 13653776

SEQ ID NO: 119539 - protein, 276 aa, Arabidopsis thaliana; identical to SEQ ID NO: 108300
  peptide (1)..(276): Ceres Seq. ID no. 13653777

SEQ ID NO: 119540 - DNA, 1125 bp, Arabidopsis thaliana; identical to SEQ ID NO: 108301
  misc_feature (1)..(1125): Ceres Seq. ID no. 13653782
  misc_feature (1)..(1125): Ortholog of  Ceres SEQ ID NO 14302919 as cited in SEQ ID NO 20338
  misc_feature (1)..(1125): Ortholog of  Ceres SEQ ID NO 13595497 as cited in SEQ ID NO 51127
  misc_feature (1)..(1125): Ortholog of  Ceres SEQ ID NO 14314046 as cited in SEQ ID NO 59316

SEQ ID NO: 119541 - protein, 284 aa, Arabidopsis thaliana; identical to SEQ ID NO: 37759
  peptide (1)..(284): Ceres Seq. ID no. 13653783

SEQ ID NO: 119542 - protein, 283 aa, Arabidopsis thaliana; identical to SEQ ID NO: 37760
  peptide (1)..(283): Ceres Seq. ID no. 13653784

SEQ ID NO: 119543 - DNA, 770 bp, Arabidopsis thaliana; identical to SEQ ID NO: 108304
  misc_feature (1)..(770): Ceres Seq. ID no. 13653792
  misc_feature (1)..(770): Ortholog of  Ceres SEQ ID NO 13580204 as cited in SEQ ID NO 0

SEQ ID NO: 119544 - protein, 151 aa, Arabidopsis thaliana; identical to SEQ ID NO: 29525
  peptide (1)..(151): Ceres Seq. ID no. 13653793

SEQ ID NO: 119545 - protein, 148 aa, Arabidopsis thaliana; identical to SEQ ID NO: 29526
  peptide (1)..(148): Ceres Seq. ID no. 13653794

SEQ ID NO: 119546 - DNA, 508 bp, Arabidopsis thaliana; identical to SEQ ID NO: 108307
  misc_feature (1)..(508): Ceres Seq. ID no. 13653819
  misc_feature (1)..(508): Ortholog of  Ceres SEQ ID NO 12562293 as cited in SEQ ID NO 20690

SEQ ID NO: 119547 - protein, 120 aa, Arabidopsis thaliana; identical to SEQ ID NO: 108308
  peptide (1)..(120): Ceres Seq. ID no. 13653820

SEQ ID NO: 119548 - protein, 92 aa, Arabidopsis thaliana; identical to SEQ ID NO: 108309
  peptide (1)..(92): Ceres Seq. ID no. 13653821

SEQ ID NO: 119549 - protein, 67 aa, Arabidopsis thaliana; identical to SEQ ID NO: 108310
  peptide (1)..(67): Ceres Seq. ID no. 13653822

SEQ ID NO: 119550 - DNA, 1776 bp, Arabidopsis thaliana; identical to SEQ ID NO: 108311
  misc_feature (1)..(1776): Ceres Seq. ID no. 13653827
  misc_feature (1)..(1776): Ortholog of  Ceres SEQ ID NO 14311001 as cited in SEQ ID NO 53717
  misc_feature (1)..(1776): Ortholog of  Ceres SEQ ID NO 14314945 as cited in SEQ ID NO 58031
  misc_feature (1)..(1776): Ortholog of  Ceres SEQ ID NO 13595833 as cited in SEQ ID NO 59877
  misc_feature (1)..(1776): Ortholog of  Ceres SEQ ID NO 13654452 as cited in SEQ ID NO 65792
  misc_feature (1)..(1776): Ortholog of  Ceres SEQ ID NO 13573778 as cited in SEQ ID NO 0

SEQ ID NO: 119551 - protein, 423 aa, Arabidopsis thaliana; identical to SEQ ID NO: 41604
  peptide (1)..(423): Ceres Seq. ID no. 13653828

SEQ ID NO: 119552 - protein, 390 aa, Arabidopsis thaliana; identical to SEQ ID NO: 41605
  peptide (1)..(390): Ceres Seq. ID no. 13653829

SEQ ID NO: 119553 - protein, 361 aa, Arabidopsis thaliana; identical to SEQ ID NO: 41606
  peptide (1)..(361): Ceres Seq. ID no. 13653830

SEQ ID NO: 119554 - DNA, 1357 bp, Arabidopsis thaliana; identical to SEQ ID NO: 108315
  misc_feature (1)..(1357): Ceres Seq. ID no. 13653838
  misc_feature (1)..(1357): Ortholog of  Ceres SEQ ID NO 15177750 as cited in SEQ ID NO 57772
  misc_feature (1)..(1357): Ortholog of  Ceres SEQ ID NO 13596581 as cited in SEQ ID NO 62420
  misc_feature (1)..(1357): Ortholog of  Ceres SEQ ID NO 13591273 as cited in SEQ ID NO 65904
  misc_feature (1)..(1357): Ortholog of  Ceres SEQ ID NO 13623086 as cited in SEQ ID NO 0

SEQ ID NO: 119555 - protein, 402 aa, Arabidopsis thaliana; identical to SEQ ID NO: 108316
  peptide (1)..(402): Ceres Seq. ID no. 13653839

SEQ ID NO: 119556 - protein, 379 aa, Arabidopsis thaliana; identical to SEQ ID NO: 22337
  peptide (1)..(379): Ceres Seq. ID no. 13653840

SEQ ID NO: 119557 - protein, 255 aa, Arabidopsis thaliana; identical to SEQ ID NO: 22338
  peptide (1)..(255): Ceres Seq. ID no. 13653841

SEQ ID NO: 119558 - DNA, 1436 bp, Arabidopsis thaliana; identical to SEQ ID NO: 108319
  misc_feature (1)..(1436): Ceres Seq. ID no. 13653846
  misc_feature (1)..(1436): Ortholog of  Ceres SEQ ID NO 13654557 as cited in SEQ ID NO 68444

SEQ ID NO: 119559 - protein, 414 aa, Arabidopsis thaliana; identical to SEQ ID NO: 108320
  peptide (1)..(414): Ceres Seq. ID no. 13653847

SEQ ID NO: 119560 - protein, 407 aa, Arabidopsis thaliana; identical to SEQ ID NO: 36166
  peptide (1)..(407): Ceres Seq. ID no. 13653848

SEQ ID NO: 119561 - protein, 388 aa, Arabidopsis thaliana; identical to SEQ ID NO: 36167
  peptide (1)..(388): Ceres Seq. ID no. 13653849

SEQ ID NO: 119562 - DNA, 1533 bp, Arabidopsis thaliana; identical to SEQ ID NO: 108323
  misc_feature (1)..(1533): Ceres Seq. ID no. 13653871
  misc_feature (1)..(1533): Ortholog of  Ceres SEQ ID NO 14313413 as cited in SEQ ID NO 58766
  misc_feature (1)..(1533): Ortholog of  Ceres SEQ ID NO 15171109 as cited in SEQ ID NO 59576

SEQ ID NO: 119563 - protein, 433 aa, Arabidopsis thaliana; identical to SEQ ID NO: 108324
  peptide (1)..(433): Ceres Seq. ID no. 13653872

SEQ ID NO: 119564 - protein, 252 aa, Arabidopsis thaliana; identical to SEQ ID NO: 45429
  peptide (1)..(252): Ceres Seq. ID no. 13653873

SEQ ID NO: 119565 - DNA, 1395 bp, Arabidopsis thaliana; identical to SEQ ID NO: 108326
  misc_feature (1)..(1395): Ceres Seq. ID no. 13653874
  misc_feature (1)..(1395): Ortholog of  Ceres SEQ ID NO 12780298 as cited in SEQ ID NO 65880
  misc_feature (1)..(1395): Ortholog of  Ceres SEQ ID NO 13654539 as cited in SEQ ID NO 68015

SEQ ID NO: 119566 - protein, 464 aa, Arabidopsis thaliana; identical to SEQ ID NO: 108327
  peptide (1)..(464): Ceres Seq. ID no. 13653875

SEQ ID NO: 119567 - protein, 403 aa, Arabidopsis thaliana; identical to SEQ ID NO: 108328
  peptide (1)..(403): Ceres Seq. ID no. 13653876

SEQ ID NO: 119568 - protein, 389 aa, Arabidopsis thaliana; identical to SEQ ID NO: 108329
  peptide (1)..(389): Ceres Seq. ID no. 13653877

SEQ ID NO: 119569 - DNA, 1100 bp, Arabidopsis thaliana; identical to SEQ ID NO: 108330
  misc_feature (1)..(1100): Ceres Seq. ID no. 13653878
  misc_feature (1)..(1100): Ortholog of  Ceres SEQ ID NO 13590967 as cited in SEQ ID NO 65553
  misc_feature (1)..(1100): Ortholog of  Ceres SEQ ID NO 14309438 as cited in SEQ ID NO 0

SEQ ID NO: 119570 - protein, 290 aa, Arabidopsis thaliana; identical to SEQ ID NO: 49145
  peptide (1)..(290): Ceres Seq. ID no. 13653879

SEQ ID NO: 119571 - protein, 288 aa, Arabidopsis thaliana; identical to SEQ ID NO: 49146
  peptide (1)..(288): Ceres Seq. ID no. 13653880

SEQ ID NO: 119572 - protein, 177 aa, Arabidopsis thaliana; identical to SEQ ID NO: 49147
  peptide (1)..(177): Ceres Seq. ID no. 13653881

SEQ ID NO: 119573 - DNA, 1274 bp, Arabidopsis thaliana; identical to SEQ ID NO: 108334
  misc_feature (1)..(1274): Ceres Seq. ID no. 13653882
  misc_feature (1)..(1274): Ortholog of  Ceres SEQ ID NO 14302919 as cited in SEQ ID NO 20338
  misc_feature (1)..(1274): Ortholog of  Ceres SEQ ID NO 13595497 as cited in SEQ ID NO 51127
  misc_feature (1)..(1274): Ortholog of  Ceres SEQ ID NO 14306765 as cited in SEQ ID NO 53275
  misc_feature (1)..(1274): Ortholog of  Ceres SEQ ID NO 14314046 as cited in SEQ ID NO 59316

SEQ ID NO: 119574 - protein, 315 aa, Arabidopsis thaliana; identical to SEQ ID NO: 108335
  peptide (1)..(315): Ceres Seq. ID no. 13653883

SEQ ID NO: 119575 - protein, 286 aa, Arabidopsis thaliana; identical to SEQ ID NO: 108336
  peptide (1)..(286): Ceres Seq. ID no. 13653884

SEQ ID NO: 119576 - protein, 275 aa, Arabidopsis thaliana; identical to SEQ ID NO: 108337
  peptide (1)..(275): Ceres Seq. ID no. 13653885

SEQ ID NO: 119577 - DNA, 1233 bp, Arabidopsis thaliana; identical to SEQ ID NO: 108338
  misc_feature (1)..(1233): Ceres Seq. ID no. 13653890
  misc_feature (1)..(1233): Ortholog of  Ceres SEQ ID NO 13594213 as cited in SEQ ID NO 57038
  misc_feature (1)..(1233): Ortholog of  Ceres SEQ ID NO 13654989 as cited in SEQ ID NO 63117
  misc_feature (1)..(1233): Ortholog of  Ceres SEQ ID NO 13584744 as cited in SEQ ID NO 69137

SEQ ID NO: 119578 - protein, 410 aa, Arabidopsis thaliana; identical to SEQ ID NO: 107711
  peptide (1)..(410): Ceres Seq. ID no. 13653891

SEQ ID NO: 119579 - protein, 259 aa, Arabidopsis thaliana; identical to SEQ ID NO: 107712
  peptide (1)..(259): Ceres Seq. ID no. 13653892

SEQ ID NO: 119580 - protein, 236 aa, Arabidopsis thaliana; identical to SEQ ID NO: 71405
  peptide (1)..(236): Ceres Seq. ID no. 13653893

SEQ ID NO: 119581 - DNA, 679 bp, Arabidopsis thaliana; identical to SEQ ID NO: 108342
  misc_feature (1)..(679): Ceres Seq. ID no. 13653894
  misc_feature (1)..(679): Ortholog of  Ceres SEQ ID NO 15172691 as cited in SEQ ID NO 56148
  misc_feature (1)..(679): Ortholog of  Ceres SEQ ID NO 15226850 as cited in SEQ ID NO 62501

SEQ ID NO: 119582 - protein, 175 aa, Arabidopsis thaliana; identical to SEQ ID NO: 108343
  peptide (1)..(175): Ceres Seq. ID no. 13653895

SEQ ID NO: 119583 - protein, 148 aa, Arabidopsis thaliana; identical to SEQ ID NO: 98419
  peptide (1)..(148): Ceres Seq. ID no. 13653896

SEQ ID NO: 119584 - protein, 135 aa, Arabidopsis thaliana; identical to SEQ ID NO: 98420
  peptide (1)..(135): Ceres Seq. ID no. 13653897

SEQ ID NO: 119585 - DNA, 2250 bp, Arabidopsis thaliana; identical to SEQ ID NO: 108346
  misc_feature (1)..(2250): Ceres Seq. ID no. 13653898
  misc_feature (1)..(2250): Ortholog of  Ceres SEQ ID NO 15174638 as cited in SEQ ID NO 53185
  misc_feature (1)..(2250): Ortholog of  Ceres SEQ ID NO 13657460 as cited in SEQ ID NO 66115
  misc_feature (1)..(2250): Ortholog of  Ceres SEQ ID NO 13659394 as cited in SEQ ID NO 67049

SEQ ID NO: 119586 - protein, 587 aa, Arabidopsis thaliana; identical to SEQ ID NO: 45017
  peptide (1)..(587): Ceres Seq. ID no. 13653899

SEQ ID NO: 119587 - protein, 559 aa, Arabidopsis thaliana; identical to SEQ ID NO: 45018
  peptide (1)..(559): Ceres Seq. ID no. 13653900

SEQ ID NO: 119588 - protein, 558 aa, Arabidopsis thaliana; identical to SEQ ID NO: 45019
  peptide (1)..(558): Ceres Seq. ID no. 13653901

SEQ ID NO: 119589 - DNA, 1130 bp, Arabidopsis thaliana; identical to SEQ ID NO: 108350
  misc_feature (1)..(1130): Ceres Seq. ID no. 13653918
  misc_feature (1)..(1130): Ortholog of  Ceres SEQ ID NO 12582251 as cited in SEQ ID NO 55724

SEQ ID NO: 119590 - protein, 376 aa, Arabidopsis thaliana; identical to SEQ ID NO: 108351
  peptide (1)..(376): Ceres Seq. ID no. 13653919

SEQ ID NO: 119591 - protein, 375 aa, Arabidopsis thaliana; identical to SEQ ID NO: 108352
  peptide (1)..(375): Ceres Seq. ID no. 13653920

SEQ ID NO: 119592 - protein, 338 aa, Arabidopsis thaliana; identical to SEQ ID NO: 108353
  peptide (1)..(338): Ceres Seq. ID no. 13653921

SEQ ID NO: 119593 - DNA, 833 bp, Arabidopsis thaliana; identical to SEQ ID NO: 108354
  misc_feature (1)..(833): Ceres Seq. ID no. 13653929
  misc_feature (1)..(833): Ortholog of  Ceres SEQ ID NO 15174142 as cited in SEQ ID NO 64367

SEQ ID NO: 119594 - protein, 206 aa, Arabidopsis thaliana [sequence omitted]

SEQ ID NO: 119595 - protein, 141 aa, Arabidopsis thaliana; identical to SEQ ID NO: 25776
  peptide (1)..(141): Ceres Seq. ID no. 13653931

SEQ ID NO: 119596 - DNA, 1079 bp, Arabidopsis thaliana; identical to SEQ ID NO: 108357
  misc_feature (1)..(1079): Ceres Seq. ID no. 13667104
  misc_feature (1)..(1079): Ortholog of  Ceres SEQ ID NO 15180382 as cited in SEQ ID NO 0

SEQ ID NO: 119597 - protein, 242 aa, Arabidopsis thaliana; identical to SEQ ID NO: 108358
  peptide (1)..(242): Ceres Seq. ID no. 13667105

SEQ ID NO: 119598 - protein, 240 aa, Arabidopsis thaliana; identical to SEQ ID NO: 108359
  peptide (1)..(240): Ceres Seq. ID no. 13667106

SEQ ID NO: 119599 - protein, 235 aa, Arabidopsis thaliana; identical to SEQ ID NO: 108360
  peptide (1)..(235): Ceres Seq. ID no. 13667107

SEQ ID NO: 119600 - DNA, 1403 bp, Arabidopsis thaliana; identical to SEQ ID NO: 108361
  misc_feature (1)..(1403): Ceres Seq. ID no. 13667108
  misc_feature (1)..(1403): Ortholog of  Ceres SEQ ID NO 15180382 as cited in SEQ ID NO 0

SEQ ID NO: 119601 - protein, 404 aa, Arabidopsis thaliana; identical to SEQ ID NO: 108362
  peptide (1)..(404): Ceres Seq. ID no. 13667109

SEQ ID NO: 119602 - protein, 353 aa, Arabidopsis thaliana; identical to SEQ ID NO: 108363
  peptide (1)..(353): Ceres Seq. ID no. 13667110

SEQ ID NO: 119603 - protein, 343 aa, Arabidopsis thaliana; identical to SEQ ID NO: 108364
  peptide (1)..(343): Ceres Seq. ID no. 13667111

SEQ ID NO: 119604 - DNA, 1542 bp, Arabidopsis thaliana; identical to SEQ ID NO: 108365
  misc_feature (1)..(1542): Ceres Seq. ID no. 13667128
  misc_feature (1)..(1542): Ortholog of  Ceres SEQ ID NO 13595164 as cited in SEQ ID NO 56222
  misc_feature (1)..(1542): Ortholog of  Ceres SEQ ID NO 13595665 as cited in SEQ ID NO 59902
  misc_feature (1)..(1542): Ortholog of  Ceres SEQ ID NO 14302438 as cited in SEQ ID NO 62982
  misc_feature (1)..(1542): Ortholog of  Ceres SEQ ID NO 13591068 as cited in SEQ ID NO 69043
  misc_feature (1)..(1542): Ortholog of  Ceres SEQ ID NO 13623041 as cited in SEQ ID NO 0

SEQ ID NO: 119605 - protein, 323 aa, Arabidopsis thaliana; identical to SEQ ID NO: 75872
  peptide (1)..(323): Ceres Seq. ID no. 13667129

SEQ ID NO: 119606 - protein, 304 aa, Arabidopsis thaliana; identical to SEQ ID NO: 75873
  peptide (1)..(304): Ceres Seq. ID no. 13667130

SEQ ID NO: 119607 - protein, 284 aa, Arabidopsis thaliana; identical to SEQ ID NO: 75874
  peptide (1)..(284): Ceres Seq. ID no. 13667131

SEQ ID NO: 119608 - DNA, 1281 bp, Arabidopsis thaliana; identical to SEQ ID NO: 108369
  misc_feature (1)..(1281): Ceres Seq. ID no. 13667195
  misc_feature (1)..(1281): Ortholog of  Ceres SEQ ID NO 15178260 as cited in SEQ ID NO 59907
  misc_feature (1)..(1281): Ortholog of  Ceres SEQ ID NO 14313548 as cited in SEQ ID NO 68496

SEQ ID NO: 119609 - protein, 199 aa, Arabidopsis thaliana; identical to SEQ ID NO: 29134
  peptide (1)..(199): Ceres Seq. ID no. 13667196

SEQ ID NO: 119610 - protein, 125 aa, Arabidopsis thaliana; identical to SEQ ID NO: 29135
  peptide (1)..(125): Ceres Seq. ID no. 13667197

SEQ ID NO: 119611 - DNA, 2312 bp, Arabidopsis thaliana; identical to SEQ ID NO: 108372
  misc_feature (1)..(2312): Ceres Seq. ID no. 13667279
  misc_feature (1)..(2312): Ortholog of  Ceres SEQ ID NO 14308618 as cited in SEQ ID NO 58541

SEQ ID NO: 119612 - protein, 678 aa, Arabidopsis thaliana; identical to SEQ ID NO: 108373
  peptide (1)..(678): Ceres Seq. ID no. 13667280

SEQ ID NO: 119613 - protein, 676 aa, Arabidopsis thaliana; identical to SEQ ID NO: 108374
  peptide (1)..(676): Ceres Seq. ID no. 13667281

SEQ ID NO: 119614 - protein, 552 aa, Arabidopsis thaliana; identical to SEQ ID NO: 108375
  peptide (1)..(552): Ceres Seq. ID no. 13667282

SEQ ID NO: 119615 - DNA, 1735 bp, Arabidopsis thaliana; identical to SEQ ID NO: 108376
  misc_feature (1)..(1735): Ceres Seq. ID no. 13667293
  misc_feature (1)..(1735): Ortholog of  Ceres SEQ ID NO 14307728 as cited in SEQ ID NO 54710

SEQ ID NO: 119616 - protein, 513 aa, Arabidopsis thaliana; identical to SEQ ID NO: 108377
  peptide (1)..(513): Ceres Seq. ID no. 13667294

SEQ ID NO: 119617 - protein, 445 aa, Arabidopsis thaliana; identical to SEQ ID NO: 108378
  peptide (1)..(445): Ceres Seq. ID no. 13667295

SEQ ID NO: 119618 - protein, 380 aa, Arabidopsis thaliana; identical to SEQ ID NO: 108379
  peptide (1)..(380): Ceres Seq. ID no. 13667296

SEQ ID NO: 119619 - DNA, 1211 bp, Arabidopsis thaliana; identical to SEQ ID NO: 108380
  misc_feature (1)..(1211): Ceres Seq. ID no. 13667301
  misc_feature (1)..(1211): Ortholog of  Ceres SEQ ID NO 13598528 as cited in SEQ ID NO 64938

SEQ ID NO: 119620 - protein, 327 aa, Arabidopsis thaliana; identical to SEQ ID NO: 108381
  peptide (1)..(327): Ceres Seq. ID no. 13667302

SEQ ID NO: 119621 - protein, 322 aa, Arabidopsis thaliana; identical to SEQ ID NO: 36030
  peptide (1)..(322): Ceres Seq. ID no. 13667303

SEQ ID NO: 119622 - protein, 262 aa, Arabidopsis thaliana; identical to SEQ ID NO: 36031
  peptide (1)..(262): Ceres Seq. ID no. 13667304

SEQ ID NO: 119623 - DNA, 2127 bp, Arabidopsis thaliana; identical to SEQ ID NO: 108384
  misc_feature (1)..(2127): Ceres Seq. ID no. 13667313
  misc_feature (1)..(2127): Ortholog of  Ceres SEQ ID NO 13595870 as cited in SEQ ID NO 62101
  misc_feature (1)..(2127): Ortholog of  Ceres SEQ ID NO 13590241 as cited in SEQ ID NO 63878
  misc_feature (1)..(2127): Ortholog of  Ceres SEQ ID NO 13657939 as cited in SEQ ID NO 66349

SEQ ID NO: 119624 - protein, 634 aa, Arabidopsis thaliana; identical to SEQ ID NO: 108385
  peptide (1)..(634): Ceres Seq. ID no. 13667314

SEQ ID NO: 119625 - protein, 517 aa, Arabidopsis thaliana; identical to SEQ ID NO: 108386
  peptide (1)..(517): Ceres Seq. ID no. 13667315

SEQ ID NO: 119626 - protein, 461 aa, Arabidopsis thaliana; identical to SEQ ID NO: 108387
  peptide (1)..(461): Ceres Seq. ID no. 13667316

SEQ ID NO: 119627 - DNA, 1180 bp, Arabidopsis thaliana; identical to SEQ ID NO: 108388
  misc_feature (1)..(1180): Ceres Seq. ID no. 13667333
  misc_feature (1)..(1180): Ortholog of  Ceres SEQ ID NO 13593831 as cited in SEQ ID NO 53828

SEQ ID NO: 119628 - protein, 287 aa, Arabidopsis thaliana; identical to SEQ ID NO: 29005
  peptide (1)..(287): Ceres Seq. ID no. 13667334

SEQ ID NO: 119629 - protein, 214 aa, Arabidopsis thaliana; identical to SEQ ID NO: 29006
  peptide (1)..(214): Ceres Seq. ID no. 13667335

SEQ ID NO: 119630 - protein, 206 aa, Arabidopsis thaliana; identical to SEQ ID NO: 29007
  peptide (1)..(206): Ceres Seq. ID no. 13667336

SEQ ID NO: 119631 - DNA, 930 bp, Arabidopsis thaliana; identical to SEQ ID NO: 108392
  misc_feature (1)..(930): Ceres Seq. ID no. 13667345
  misc_feature (1)..(930): Ortholog of  Ceres SEQ ID NO 13595093 as cited in SEQ ID NO 56132
  misc_feature (1)..(930): Ortholog of  Ceres SEQ ID NO 13661727 as cited in SEQ ID NO 61376

SEQ ID NO: 119632 - protein, 278 aa, Arabidopsis thaliana; identical to SEQ ID NO: 108393
  peptide (1)..(278): Ceres Seq. ID no. 13667346

SEQ ID NO: 119633 - protein, 265 aa, Arabidopsis thaliana; identical to SEQ ID NO: 24800
  peptide (1)..(265): Ceres Seq. ID no. 13667347

SEQ ID NO: 119634 - protein, 261 aa, Arabidopsis thaliana; identical to SEQ ID NO: 24801
  peptide (1)..(261): Ceres Seq. ID no. 13667348

SEQ ID NO: 119635 - DNA, 2125 bp, Arabidopsis thaliana; identical to SEQ ID NO: 108396
  misc_feature (1)..(2125): Ceres Seq. ID no. 13667359
  misc_feature (1)..(2125): Ortholog of  Ceres SEQ ID NO 14312351 as cited in SEQ ID NO 55278
  misc_feature (1)..(2125): Ortholog of  Ceres SEQ ID NO 13655237 as cited in SEQ ID NO 62892
  misc_feature (1)..(2125): Ortholog of  Ceres SEQ ID NO 13597268 as cited in SEQ ID NO 63929
  misc_feature (1)..(2125): Ortholog of  Ceres SEQ ID NO 13659840 as cited in SEQ ID NO 66970
  misc_feature (1)..(2125): Ortholog of  Ceres SEQ ID NO 13660544 as cited in SEQ ID NO 67401

SEQ ID NO: 119636 - protein, 663 aa, Arabidopsis thaliana; identical to SEQ ID NO: 108397
  peptide (1)..(663): Ceres Seq. ID no. 13667360

SEQ ID NO: 119637 - protein, 658 aa, Arabidopsis thaliana; identical to SEQ ID NO: 108398
  peptide (1)..(658): Ceres Seq. ID no. 13667361

SEQ ID NO: 119638 - DNA, 2958 bp, Arabidopsis thaliana; identical to SEQ ID NO: 108399
  misc_feature (1)..(2958): Ceres Seq. ID no. 13667366
  misc_feature (1)..(2958): Ortholog of  Ceres SEQ ID NO 14306268 as cited in SEQ ID NO 51135
  misc_feature (1)..(2958): Ortholog of  Ceres SEQ ID NO 15225368 as cited in SEQ ID NO 58345
  misc_feature (1)..(2958): Ortholog of  Ceres SEQ ID NO 13584744 as cited in SEQ ID NO 69137

SEQ ID NO: 119639 - protein, 663 aa, Arabidopsis thaliana; identical to SEQ ID NO: 108400
  peptide (1)..(663): Ceres Seq. ID no. 13667367

SEQ ID NO: 119640 - protein, 654 aa, Arabidopsis thaliana; identical to SEQ ID NO: 108401
  peptide (1)..(654): Ceres Seq. ID no. 13667368

SEQ ID NO: 119641 - protein, 470 aa, Arabidopsis thaliana; identical to SEQ ID NO: 108402
  peptide (1)..(470): Ceres Seq. ID no. 13667369

SEQ ID NO: 119642 - DNA, 1156 bp, Arabidopsis thaliana; identical to SEQ ID NO: 108403
  misc_feature (1)..(1156): Ceres Seq. ID no. 13667380
  misc_feature (1)..(1156): Ortholog of  Ceres SEQ ID NO 13657647 as cited in SEQ ID NO 66399

SEQ ID NO: 119643 - protein, 381 aa, Arabidopsis thaliana; identical to SEQ ID NO: 108404
  peptide (1)..(381): Ceres Seq. ID no. 13667381

SEQ ID NO: 119644 - protein, 380 aa, Arabidopsis thaliana; identical to SEQ ID NO: 108405
  peptide (1)..(380): Ceres Seq. ID no. 13667382

SEQ ID NO: 119645 - protein, 340 aa, Arabidopsis thaliana; identical to SEQ ID NO: 108406
  peptide (1)..(340): Ceres Seq. ID no. 13667383

SEQ ID NO: 119646 - DNA, 1248 bp, Arabidopsis thaliana; identical to SEQ ID NO: 108407
  misc_feature (1)..(1248): Ceres Seq. ID no. 13667384
  misc_feature (1)..(1248): Ortholog of  Ceres SEQ ID NO 13657647 as cited in SEQ ID NO 66399

SEQ ID NO: 119647 - protein, 386 aa, Arabidopsis thaliana; identical to SEQ ID NO: 108408
  peptide (1)..(386): Ceres Seq. ID no. 13667385

SEQ ID NO: 119648 - protein, 338 aa, Arabidopsis thaliana; identical to SEQ ID NO: 108409
  peptide (1)..(338): Ceres Seq. ID no. 13667386

SEQ ID NO: 119649 - protein, 195 aa, Arabidopsis thaliana; identical to SEQ ID NO: 108410
  peptide (1)..(195): Ceres Seq. ID no. 13667387

SEQ ID NO: 119650 - DNA, 2129 bp, Arabidopsis thaliana; identical to SEQ ID NO: 108411
  misc_feature (1)..(2129): Ceres Seq. ID no. 13667403
  misc_feature (1)..(2129): Ortholog of  Ceres SEQ ID NO 14312180 as cited in SEQ ID NO 59480

SEQ ID NO: 119651 - protein, 657 aa, Arabidopsis thaliana; identical to SEQ ID NO: 108412
  peptide (1)..(657): Ceres Seq. ID no. 13667404

SEQ ID NO: 119652 - protein, 604 aa, Arabidopsis thaliana; identical to SEQ ID NO: 108413
  peptide (1)..(604): Ceres Seq. ID no. 13667405

SEQ ID NO: 119653 - protein, 430 aa, Arabidopsis thaliana; identical to SEQ ID NO: 108414
  peptide (1)..(430): Ceres Seq. ID no. 13667406

SEQ ID NO: 119654 - DNA, 1490 bp, Arabidopsis thaliana; identical to SEQ ID NO: 108415
  misc_feature (1)..(1490): Ceres Seq. ID no. 13667407
  misc_feature (1)..(1490): Ortholog of  Ceres SEQ ID NO 14314792 as cited in SEQ ID NO 56837

SEQ ID NO: 119655 - protein, 299 aa, Arabidopsis thaliana; identical to SEQ ID NO: 108416
  peptide (1)..(299): Ceres Seq. ID no. 13667408

SEQ ID NO: 119656 - protein, 296 aa, Arabidopsis thaliana; identical to SEQ ID NO: 108417
  peptide (1)..(296): Ceres Seq. ID no. 13667409

SEQ ID NO: 119657 - protein, 242 aa, Arabidopsis thaliana; identical to SEQ ID NO: 108418
  peptide (1)..(242): Ceres Seq. ID no. 13667410

SEQ ID NO: 119658 - DNA, 1846 bp, Arabidopsis thaliana; identical to SEQ ID NO: 108419
  misc_feature (1)..(1846): Ceres Seq. ID no. 13667411
  misc_feature (1)..(1846): Ortholog of  Ceres SEQ ID NO 13597376 as cited in SEQ ID NO 64002
  misc_feature (1)..(1846): Ortholog of  Ceres SEQ ID NO 13503573 as cited in SEQ ID NO 65402
  misc_feature (1)..(1846): Ortholog of  Ceres SEQ ID NO 13659615 as cited in SEQ ID NO 67248

SEQ ID NO: 119659 - protein, 419 aa, Arabidopsis thaliana; identical to SEQ ID NO: 108420
  peptide (1)..(419): Ceres Seq. ID no. 13667412

SEQ ID NO: 119660 - protein, 403 aa, Arabidopsis thaliana; identical to SEQ ID NO: 108421
  peptide (1)..(403): Ceres Seq. ID no. 13667413

SEQ ID NO: 119661 - protein, 370 aa, Arabidopsis thaliana; identical to SEQ ID NO: 108422
  peptide (1)..(370): Ceres Seq. ID no. 13667414

SEQ ID NO: 119662 - DNA, 784 bp, Arabidopsis thaliana; identical to SEQ ID NO: 108423
  misc_feature (1)..(784): Ceres Seq. ID no. 13667415
  misc_feature (1)..(784): Ortholog of  Ceres SEQ ID NO 14314442 as cited in SEQ ID NO 52358
  misc_feature (1)..(784): Ortholog of  Ceres SEQ ID NO 12610442 as cited in SEQ ID NO 56281
  misc_feature (1)..(784): Ortholog of  Ceres SEQ ID NO 12610713 as cited in SEQ ID NO 56591
  misc_feature (1)..(784): Ortholog of  Ceres SEQ ID NO 12587345 as cited in SEQ ID NO 62844
  misc_feature (1)..(784): Ortholog of  Ceres SEQ ID NO 13597357 as cited in SEQ ID NO 68961
  misc_feature (1)..(784): Ortholog of  Ceres SEQ ID NO 13587656 as cited in SEQ ID NO 0
  misc_feature (1)..(784): Ortholog of  Ceres SEQ ID NO 14309353 as cited in SEQ ID NO 0

SEQ ID NO: 119663 - protein, 142 aa, Arabidopsis thaliana; identical to SEQ ID NO: 108424
  peptide (1)..(142): Ceres Seq. ID no. 13667416

SEQ ID NO: 119664 - protein, 129 aa, Arabidopsis thaliana; identical to SEQ ID NO: 108425
  peptide (1)..(129): Ceres Seq. ID no. 13667417

SEQ ID NO: 119665 - protein, 103 aa, Arabidopsis thaliana; identical to SEQ ID NO: 108426
  peptide (1)..(103): Ceres Seq. ID no. 13667418

SEQ ID NO: 119666 - DNA, 897 bp, Arabidopsis thaliana; identical to SEQ ID NO: 108427
  misc_feature (1)..(897): Ceres Seq. ID no. 13667439
  misc_feature (1)..(897): Ortholog of  Ceres SEQ ID NO 14313170 as cited in SEQ ID NO 20674

SEQ ID NO: 119667 - protein, 269 aa, Arabidopsis thaliana; identical to SEQ ID NO: 80584
  peptide (1)..(269): Ceres Seq. ID no. 13667440

SEQ ID NO: 119668 - DNA, 2108 bp, Arabidopsis thaliana; identical to SEQ ID NO: 108429
  misc_feature (1)..(2108): Ceres Seq. ID no. 13667452
  misc_feature (1)..(2108): Ortholog of  Ceres SEQ ID NO 15177478 as cited in SEQ ID NO 1121

SEQ ID NO: 119669 - protein, 414 aa, Arabidopsis thaliana; identical to SEQ ID NO: 108430
  peptide (1)..(414): Ceres Seq. ID no. 13667453

SEQ ID NO: 119670 - protein, 374 aa, Arabidopsis thaliana; identical to SEQ ID NO: 108431
  peptide (1)..(374): Ceres Seq. ID no. 13667454

SEQ ID NO: 119671 - protein, 320 aa, Arabidopsis thaliana; identical to SEQ ID NO: 108432
  peptide (1)..(320): Ceres Seq. ID no. 13667455

SEQ ID NO: 119672 - DNA, 2525 bp, Arabidopsis thaliana; identical to SEQ ID NO: 108433
  misc_feature (1)..(2525): Ceres Seq. ID no. 13667460
  misc_feature (1)..(2525): Ortholog of  Ceres SEQ ID NO 13582534 as cited in SEQ ID NO 57409

SEQ ID NO: 119673 - protein, 812 aa, Arabidopsis thaliana; identical to SEQ ID NO: 108434
  peptide (1)..(812): Ceres Seq. ID no. 13667461

SEQ ID NO: 119674 - protein, 808 aa, Arabidopsis thaliana; identical to SEQ ID NO: 108435
  peptide (1)..(808): Ceres Seq. ID no. 13667462

SEQ ID NO: 119675 - protein, 654 aa, Arabidopsis thaliana; identical to SEQ ID NO: 108436
  peptide (1)..(654): Ceres Seq. ID no. 13667463

SEQ ID NO: 119676 - DNA, 1290 bp, Arabidopsis thaliana; identical to SEQ ID NO: 108437
  misc_feature (1)..(1290): Ceres Seq. ID no. 13667491
  misc_feature (1)..(1290): Ortholog of  Ceres SEQ ID NO 13663419 as cited in SEQ ID NO 66561

SEQ ID NO: 119677 - protein, 411 aa, Arabidopsis thaliana; identical to SEQ ID NO: 108438
  peptide (1)..(411): Ceres Seq. ID no. 13667492

SEQ ID NO: 119678 - protein, 294 aa, Arabidopsis thaliana; identical to SEQ ID NO: 108439
  peptide (1)..(294): Ceres Seq. ID no. 13667493

SEQ ID NO: 119679 - protein, 231 aa, Arabidopsis thaliana; identical to SEQ ID NO: 108440
  peptide (1)..(231): Ceres Seq. ID no. 13667494

SEQ ID NO: 119680 - DNA, 1051 bp, Arabidopsis thaliana; identical to SEQ ID NO: 108441
  misc_feature (1)..(1051): Ceres Seq. ID no. 13667503
  misc_feature (1)..(1051): Ortholog of  Ceres SEQ ID NO 13638532 as cited in SEQ ID NO 51186
  misc_feature (1)..(1051): Ortholog of  Ceres SEQ ID NO 14306733 as cited in SEQ ID NO 53866
  misc_feature (1)..(1051): Ortholog of  Ceres SEQ ID NO 13596350 as cited in SEQ ID NO 68204

SEQ ID NO: 119681 - protein, 225 aa, Arabidopsis thaliana; identical to SEQ ID NO: 108442
  peptide (1)..(225): Ceres Seq. ID no. 13667504

SEQ ID NO: 119682 - DNA, 726 bp, Arabidopsis thaliana; identical to SEQ ID NO: 108443
  misc_feature (1)..(726): Ceres Seq. ID no. 13667505
  misc_feature (1)..(726): Ortholog of  Ceres SEQ ID NO 15173263 as cited in SEQ ID NO 64606

SEQ ID NO: 119683 - protein, 184 aa, Arabidopsis thaliana; identical to SEQ ID NO: 108444
  peptide (1)..(184): Ceres Seq. ID no. 13667506

SEQ ID NO: 119684 - protein, 159 aa, Arabidopsis thaliana; identical to SEQ ID NO: 41154
  peptide (1)..(159): Ceres Seq. ID no. 13667507

SEQ ID NO: 119685 - protein, 110 aa, Arabidopsis thaliana; identical to SEQ ID NO: 108446
  peptide (1)..(110): Ceres Seq. ID no. 13667508

SEQ ID NO: 119686 - DNA, 860 bp, Arabidopsis thaliana; identical to SEQ ID NO: 108447
  misc_feature (1)..(860): Ceres Seq. ID no. 13667588
  misc_feature (1)..(860): Ortholog of  Ceres SEQ ID NO 14306110 as cited in SEQ ID NO 1363

SEQ ID NO: 119687 - protein, 192 aa, Arabidopsis thaliana; identical to SEQ ID NO: 108448
  peptide (1)..(192): Ceres Seq. ID no. 13667589

SEQ ID NO: 119688 - protein, 181 aa, Arabidopsis thaliana; identical to SEQ ID NO: 108449
  peptide (1)..(181): Ceres Seq. ID no. 13667590

SEQ ID NO: 119689 - protein, 179 aa, Arabidopsis thaliana; identical to SEQ ID NO: 108450
  peptide (1)..(179): Ceres Seq. ID no. 13667591

SEQ ID NO: 119690 - DNA, 993 bp, Arabidopsis thaliana; identical to SEQ ID NO: 108451
  misc_feature (1)..(993): Ceres Seq. ID no. 13667592
  misc_feature (1)..(993): Ortholog of  Ceres SEQ ID NO 12474640 as cited in SEQ ID NO 129
  misc_feature (1)..(993): Ortholog of  Ceres SEQ ID NO 12627370 as cited in SEQ ID NO 61162
  misc_feature (1)..(993): Ortholog of  Ceres SEQ ID NO 13598268 as cited in SEQ ID NO 69313

SEQ ID NO: 119691 - protein, 248 aa, Arabidopsis thaliana; identical to SEQ ID NO: 108452
  peptide (1)..(248): Ceres Seq. ID no. 13667593

SEQ ID NO: 119692 - protein, 221 aa, Arabidopsis thaliana; identical to SEQ ID NO: 108453
  peptide (1)..(221): Ceres Seq. ID no. 13667594

SEQ ID NO: 119693 - protein, 205 aa, Arabidopsis thaliana; identical to SEQ ID NO: 108454
  peptide (1)..(205): Ceres Seq. ID no. 13667595

SEQ ID NO: 119694 - DNA, 1567 bp, Arabidopsis thaliana; identical to SEQ ID NO: 108455
  misc_feature (1)..(1567): Ceres Seq. ID no. 13667645
  misc_feature (1)..(1567): Ortholog of  Ceres SEQ ID NO 13597656 as cited in SEQ ID NO 65561

SEQ ID NO: 119695 - protein, 462 aa, Arabidopsis thaliana; identical to SEQ ID NO: 108456
  peptide (1)..(462): Ceres Seq. ID no. 13667646

SEQ ID NO: 119696 - protein, 441 aa, Arabidopsis thaliana; identical to SEQ ID NO: 108457
  peptide (1)..(441): Ceres Seq. ID no. 13667647

SEQ ID NO: 119697 - protein, 388 aa, Arabidopsis thaliana; identical to SEQ ID NO: 108458
  peptide (1)..(388): Ceres Seq. ID no. 13667648

SEQ ID NO: 119698 - DNA, 1335 bp, Arabidopsis thaliana; identical to SEQ ID NO: 108459
  misc_feature (1)..(1335): Ceres Seq. ID no. 13667657
  misc_feature (1)..(1335): Ortholog of  Ceres SEQ ID NO 15177854 as cited in SEQ ID NO 51851
  misc_feature (1)..(1335): Ortholog of  Ceres SEQ ID NO 15177087 as cited in SEQ ID NO 51932
  misc_feature (1)..(1335): Ortholog of  Ceres SEQ ID NO 13662937 as cited in SEQ ID NO 64415
  misc_feature (1)..(1335): Ortholog of  Ceres SEQ ID NO 13595984 as cited in SEQ ID NO 68340
  misc_feature (1)..(1335): Ortholog of  Ceres SEQ ID NO 12635014 as cited in SEQ ID NO 0

SEQ ID NO: 119699 - protein, 391 aa, Arabidopsis thaliana; identical to SEQ ID NO: 108460
  peptide (1)..(391): Ceres Seq. ID no. 13667658

SEQ ID NO: 119700 - protein, 374 aa, Arabidopsis thaliana; identical to SEQ ID NO: 108461
  peptide (1)..(374): Ceres Seq. ID no. 13667659

SEQ ID NO: 119701 - protein, 360 aa, Arabidopsis thaliana; identical to SEQ ID NO: 108462
  peptide (1)..(360): Ceres Seq. ID no. 13667660

SEQ ID NO: 119702 - DNA, 1146 bp, Arabidopsis thaliana; identical to SEQ ID NO: 108463
  misc_feature (1)..(1146): Ceres Seq. ID no. 13667665
  misc_feature (1)..(1146): Ortholog of  Ceres SEQ ID NO 13594193 as cited in SEQ ID NO 58558
  misc_feature (1)..(1146): Ortholog of  Ceres SEQ ID NO 15177545 as cited in SEQ ID NO 0

SEQ ID NO: 119703 - protein, 319 aa, Arabidopsis thaliana; identical to SEQ ID NO: 108464
  peptide (1)..(319): Ceres Seq. ID no. 13667666

SEQ ID NO: 119704 - protein, 294 aa, Arabidopsis thaliana; identical to SEQ ID NO: 40718
  peptide (1)..(294): Ceres Seq. ID no. 13667667

SEQ ID NO: 119705 - protein, 240 aa, Arabidopsis thaliana; identical to SEQ ID NO: 40719
  peptide (1)..(240): Ceres Seq. ID no. 13667668

SEQ ID NO: 119706 - DNA, 1806 bp, Arabidopsis thaliana; identical to SEQ ID NO: 108467
  misc_feature (1)..(1806): Ceres Seq. ID no. 13667673
  misc_feature (1)..(1806): Ortholog of  Ceres SEQ ID NO 13596021 as cited in SEQ ID NO 62020

SEQ ID NO: 119707 - protein, 501 aa, Arabidopsis thaliana; identical to SEQ ID NO: 108468
  peptide (1)..(501): Ceres Seq. ID no. 13667674

SEQ ID NO: 119708 - protein, 464 aa, Arabidopsis thaliana; identical to SEQ ID NO: 108469
  peptide (1)..(464): Ceres Seq. ID no. 13667675

SEQ ID NO: 119709 - protein, 457 aa, Arabidopsis thaliana; identical to SEQ ID NO: 108470
  peptide (1)..(457): Ceres Seq. ID no. 13667676

SEQ ID NO: 119710 - DNA, 1391 bp, Arabidopsis thaliana; identical to SEQ ID NO: 108471
  misc_feature (1)..(1391): Ceres Seq. ID no. 13667677
  misc_feature (1)..(1391): Ortholog of  Ceres SEQ ID NO 13596921 as cited in SEQ ID NO 62368
  misc_feature (1)..(1391): Ortholog of  Ceres SEQ ID NO 13600673 as cited in SEQ ID NO 0

SEQ ID NO: 119711 - protein, 401 aa, Arabidopsis thaliana; identical to SEQ ID NO: 108472
  peptide (1)..(401): Ceres Seq. ID no. 13667678

SEQ ID NO: 119712 - protein, 379 aa, Arabidopsis thaliana; identical to SEQ ID NO: 83118
  peptide (1)..(379): Ceres Seq. ID no. 13667679

SEQ ID NO: 119713 - protein, 303 aa, Arabidopsis thaliana; identical to SEQ ID NO: 83119
  peptide (1)..(303): Ceres Seq. ID no. 13667680

SEQ ID NO: 119714 - DNA, 1296 bp, Arabidopsis thaliana; identical to SEQ ID NO: 108475
  misc_feature (1)..(1296): Ceres Seq. ID no. 13667681
  misc_feature (1)..(1296): Ortholog of  Ceres SEQ ID NO 13581848 as cited in SEQ ID NO 51340
  misc_feature (1)..(1296): Ortholog of  Ceres SEQ ID NO 13595392 as cited in SEQ ID NO 56164
  misc_feature (1)..(1296): Ortholog of  Ceres SEQ ID NO 14316412 as cited in SEQ ID NO 59209
  misc_feature (1)..(1296): Ortholog of  Ceres SEQ ID NO 12618341 as cited in SEQ ID NO 64256

SEQ ID NO: 119715 - protein, 295 aa, Arabidopsis thaliana; identical to SEQ ID NO: 40675
  peptide (1)..(295): Ceres Seq. ID no. 13667682

SEQ ID NO: 119716 - protein, 289 aa, Arabidopsis thaliana; identical to SEQ ID NO: 40676
  peptide (1)..(289): Ceres Seq. ID no. 13667683

SEQ ID NO: 119717 - DNA, 942 bp, Arabidopsis thaliana; identical to SEQ ID NO: 108478
  misc_feature (1)..(942): Ceres Seq. ID no. 13667688
  misc_feature (1)..(942): Ortholog of  Ceres SEQ ID NO 14302705 as cited in SEQ ID NO 56264

SEQ ID NO: 119718 - protein, 241 aa, Arabidopsis thaliana; identical to SEQ ID NO: 100860
  peptide (1)..(241): Ceres Seq. ID no. 13667689

SEQ ID NO: 119719 - protein, 223 aa, Arabidopsis thaliana; identical to SEQ ID NO: 100861
  peptide (1)..(223): Ceres Seq. ID no. 13667690

SEQ ID NO: 119720 - protein, 202 aa, Arabidopsis thaliana; identical to SEQ ID NO: 100862
  peptide (1)..(202): Ceres Seq. ID no. 13667691

SEQ ID NO: 119721 - DNA, 571 bp, Arabidopsis thaliana; identical to SEQ ID NO: 108482
  misc_feature (1)..(571): Ceres Seq. ID no. 13667695
  misc_feature (1)..(571): Ortholog of  Ceres SEQ ID NO 15168965 as cited in SEQ ID NO 20607
  misc_feature (1)..(571): Ortholog of  Ceres SEQ ID NO 13623385 as cited in SEQ ID NO 0

SEQ ID NO: 119722 - protein, 120 aa, Arabidopsis thaliana; identical to SEQ ID NO: 108483
  peptide (1)..(120): Ceres Seq. ID no. 13667696

SEQ ID NO: 119723 - protein, 98 aa, Arabidopsis thaliana; identical to SEQ ID NO: 108484
  peptide (1)..(98): Ceres Seq. ID no. 13667697

SEQ ID NO: 119724 - DNA, 1440 bp, Arabidopsis thaliana; identical to SEQ ID NO: 108485
  misc_feature (1)..(1440): Ceres Seq. ID no. 13667698
  misc_feature (1)..(1440): Ortholog of  Ceres SEQ ID NO 14314280 as cited in SEQ ID NO 57429
  misc_feature (1)..(1440): Ortholog of  Ceres SEQ ID NO 13595870 as cited in SEQ ID NO 62101
  misc_feature (1)..(1440): Ortholog of  Ceres SEQ ID NO 13590241 as cited in SEQ ID NO 63878
  misc_feature (1)..(1440): Ortholog of  Ceres SEQ ID NO 13657939 as cited in SEQ ID NO 66349

SEQ ID NO: 119725 - protein, 421 aa, Arabidopsis thaliana; identical to SEQ ID NO: 108486
  peptide (1)..(421): Ceres Seq. ID no. 13667699

SEQ ID NO: 119726 - protein, 408 aa, Arabidopsis thaliana; identical to SEQ ID NO: 40993
  peptide (1)..(408): Ceres Seq. ID no. 13667700

SEQ ID NO: 119727 - protein, 400 aa, Arabidopsis thaliana; identical to SEQ ID NO: 40994
  peptide (1)..(400): Ceres Seq. ID no. 13667701

SEQ ID NO: 119728 - DNA, 1225 bp, Arabidopsis thaliana; identical to SEQ ID NO: 108489
  misc_feature (1)..(1225): Ceres Seq. ID no. 13667702
  misc_feature (1)..(1225): Ortholog of  Ceres SEQ ID NO 15176230 as cited in SEQ ID NO 58796
  misc_feature (1)..(1225): Ortholog of  Ceres SEQ ID NO 14308156 as cited in SEQ ID NO 59006
  misc_feature (1)..(1225): Ortholog of  Ceres SEQ ID NO 13596321 as cited in SEQ ID NO 67976

SEQ ID NO: 119729 - protein, 350 aa, Arabidopsis thaliana; identical to SEQ ID NO: 108490
  peptide (1)..(350): Ceres Seq. ID no. 13667703

SEQ ID NO: 119730 - protein, 340 aa, Arabidopsis thaliana; identical to SEQ ID NO: 90633
  peptide (1)..(340): Ceres Seq. ID no. 13667704

SEQ ID NO: 119731 - protein, 312 aa, Arabidopsis thaliana; identical to SEQ ID NO: 90634
  peptide (1)..(312): Ceres Seq. ID no. 13667705

SEQ ID NO: 119732 - DNA, 886 bp, Arabidopsis thaliana; identical to SEQ ID NO: 108493
  misc_feature (1)..(886): Ceres Seq. ID no. 13667714
  misc_feature (1)..(886): Ortholog of  Ceres SEQ ID NO 13595187 as cited in SEQ ID NO 56052
  misc_feature (1)..(886): Ortholog of  Ceres SEQ ID NO 13662053 as cited in SEQ ID NO 61547
  misc_feature (1)..(886): Ortholog of  Ceres SEQ ID NO 13624283 as cited in SEQ ID NO 0

SEQ ID NO: 119733 - protein, 177 aa, Arabidopsis thaliana; identical to SEQ ID NO: 106285
  peptide (1)..(177): Ceres Seq. ID no. 13667715

SEQ ID NO: 119734 - protein, 166 aa, Arabidopsis thaliana; identical to SEQ ID NO: 106286
  peptide (1)..(166): Ceres Seq. ID no. 13667716

SEQ ID NO: 119735 - protein, 128 aa, Arabidopsis thaliana; identical to SEQ ID NO: 106287
  peptide (1)..(128): Ceres Seq. ID no. 13667717

SEQ ID NO: 119736 - DNA, 661 bp, Arabidopsis thaliana; identical to SEQ ID NO: 108497
  misc_feature (1)..(661): Ceres Seq. ID no. 13667733
  misc_feature (1)..(661): Ortholog of  Ceres SEQ ID NO 12610954 as cited in SEQ ID NO 55930
  misc_feature (1)..(661): Ortholog of  Ceres SEQ ID NO 12625335 as cited in SEQ ID NO 63326
  misc_feature (1)..(661): Ortholog of  Ceres SEQ ID NO 12566590 as cited in SEQ ID NO 0
  misc_feature (1)..(661): Ortholog of  Ceres SEQ ID NO 14305152 as cited in SEQ ID NO 0
  misc_feature (1)..(661): Ortholog of  Ceres SEQ ID NO 15179949 as cited in SEQ ID NO 0

SEQ ID NO: 119737 - protein, 179 aa, Arabidopsis thaliana; identical to SEQ ID NO: 108498
  peptide (1)..(179): Ceres Seq. ID no. 13667734

SEQ ID NO: 119738 - protein, 162 aa, Arabidopsis thaliana; identical to SEQ ID NO: 81388
  peptide (1)..(162): Ceres Seq. ID no. 13667735

SEQ ID NO: 119739 - protein, 110 aa, Arabidopsis thaliana; identical to SEQ ID NO: 81389
  peptide (1)..(110): Ceres Seq. ID no. 13667736

SEQ ID NO: 119740 - DNA, 1690 bp, Arabidopsis thaliana; identical to SEQ ID NO: 108501
  misc_feature (1)..(1690): Ceres Seq. ID no. 13667745
  misc_feature (1)..(1690): Ortholog of  Ceres SEQ ID NO 14311305 as cited in SEQ ID NO 53731
  misc_feature (1)..(1690): Ortholog of  Ceres SEQ ID NO 13501807 as cited in SEQ ID NO 67558

SEQ ID NO: 119741 - protein, 537 aa, Arabidopsis thaliana; identical to SEQ ID NO: 108502
  peptide (1)..(537): Ceres Seq. ID no. 13667746

SEQ ID NO: 119742 - protein, 515 aa, Arabidopsis thaliana; identical to SEQ ID NO: 108503
  peptide (1)..(515): Ceres Seq. ID no. 13667747

SEQ ID NO: 119743 - protein, 355 aa, Arabidopsis thaliana; identical to SEQ ID NO: 108504
  peptide (1)..(355): Ceres Seq. ID no. 13667748

SEQ ID NO: 119744 - DNA, 1839 bp, Arabidopsis thaliana; identical to SEQ ID NO: 108505
  misc_feature (1)..(1839): Ceres Seq. ID no. 13667749
  misc_feature (1)..(1839): Ortholog of  Ceres SEQ ID NO 14311305 as cited in SEQ ID NO 53731
  misc_feature (1)..(1839): Ortholog of  Ceres SEQ ID NO 13501807 as cited in SEQ ID NO 67558

SEQ ID NO: 119745 - protein, 530 aa, Arabidopsis thaliana; identical to SEQ ID NO: 108506
  peptide (1)..(530): Ceres Seq. ID no. 13667750

SEQ ID NO: 119746 - protein, 516 aa, Arabidopsis thaliana; identical to SEQ ID NO: 108507
  peptide (1)..(516): Ceres Seq. ID no. 13667751

SEQ ID NO: 119747 - protein, 509 aa, Arabidopsis thaliana; identical to SEQ ID NO: 108508
  peptide (1)..(509): Ceres Seq. ID no. 13667752

SEQ ID NO: 119748 - DNA, 829 bp, Arabidopsis thaliana; identical to SEQ ID NO: 108509
  misc_feature (1)..(829): Ceres Seq. ID no. 13667753
  misc_feature (1)..(829): Ortholog of  Ceres SEQ ID NO 13638595 as cited in SEQ ID NO 52050
  misc_feature (1)..(829): Ortholog of  Ceres SEQ ID NO 14301870 as cited in SEQ ID NO 61501
  misc_feature (1)..(829): Ortholog of  Ceres SEQ ID NO 12583993 as cited in SEQ ID NO 68098

SEQ ID NO: 119749 - protein, 208 aa, Arabidopsis thaliana; identical to SEQ ID NO: 23207
  peptide (1)..(208): Ceres Seq. ID no. 13667754

SEQ ID NO: 119750 - protein, 110 aa, Arabidopsis thaliana; identical to SEQ ID NO: 31047
  peptide (1)..(110): Ceres Seq. ID no. 13667755

SEQ ID NO: 119751 - DNA, 1155 bp, Arabidopsis thaliana; identical to SEQ ID NO: 108512
  misc_feature (1)..(1155): Ceres Seq. ID no. 13667767
  misc_feature (1)..(1155): Ortholog of  Ceres SEQ ID NO 15175048 as cited in SEQ ID NO 59975
  misc_feature (1)..(1155): Ortholog of  Ceres SEQ ID NO 13597333 as cited in SEQ ID NO 63974
  misc_feature (1)..(1155): Ortholog of  Ceres SEQ ID NO 13599307 as cited in SEQ ID NO 0
  misc_feature (1)..(1155): Ortholog of  Ceres SEQ ID NO 15179517 as cited in SEQ ID NO 0

SEQ ID NO: 119752 - protein, 321 aa, Arabidopsis thaliana; identical to SEQ ID NO: 108513
  peptide (1)..(321): Ceres Seq. ID no. 13667768

SEQ ID NO: 119753 - protein, 309 aa, Arabidopsis thaliana; identical to SEQ ID NO: 108514
  peptide (1)..(309): Ceres Seq. ID no. 13667769

SEQ ID NO: 119754 - protein, 307 aa, Arabidopsis thaliana; identical to SEQ ID NO: 108515
  peptide (1)..(307): Ceres Seq. ID no. 13667770

SEQ ID NO: 119755 - DNA, 1210 bp, Arabidopsis thaliana; identical to SEQ ID NO: 108516
  misc_feature (1)..(1210): Ceres Seq. ID no. 13667771
  misc_feature (1)..(1210): Ortholog of  Ceres SEQ ID NO 12484482 as cited in SEQ ID NO 53324
  misc_feature (1)..(1210): Ortholog of  Ceres SEQ ID NO 15176234 as cited in SEQ ID NO 54949
  misc_feature (1)..(1210): Ortholog of  Ceres SEQ ID NO 14314507 as cited in SEQ ID NO 59337

SEQ ID NO: 119756 - protein, 271 aa, Arabidopsis thaliana; identical to SEQ ID NO: 108517
  peptide (1)..(271): Ceres Seq. ID no. 13667772

SEQ ID NO: 119757 - protein, 260 aa, Arabidopsis thaliana; identical to SEQ ID NO: 108518
  peptide (1)..(260): Ceres Seq. ID no. 13667773

SEQ ID NO: 119758 - protein, 154 aa, Arabidopsis thaliana; identical to SEQ ID NO: 108519
  peptide (1)..(154): Ceres Seq. ID no. 13667774

SEQ ID NO: 119759 - DNA, 1619 bp, Arabidopsis thaliana; identical to SEQ ID NO: 108520
  misc_feature (1)..(1619): Ceres Seq. ID no. 13667775
  misc_feature (1)..(1619): Ortholog of  Ceres SEQ ID NO 13597269 as cited in SEQ ID NO 63932

SEQ ID NO: 119760 - protein, 501 aa, Arabidopsis thaliana; identical to SEQ ID NO: 108521
  peptide (1)..(501): Ceres Seq. ID no. 13667776
  misc_feature (92)..(92): Xaa is any aa, unknown or other

SEQ ID NO: 119761 - protein, 485 aa, Arabidopsis thaliana; identical to SEQ ID NO: 108522
  peptide (1)..(485): Ceres Seq. ID no. 13667777
  misc_feature (76)..(76): Xaa is any aa, unknown or other

SEQ ID NO: 119762 - protein, 443 aa, Arabidopsis thaliana; identical to SEQ ID NO: 108523
  peptide (1)..(443): Ceres Seq. ID no. 13667778
  misc_feature (34)..(34): Xaa is any aa, unknown or other

SEQ ID NO: 119763 - DNA, 1478 bp, Arabidopsis thaliana; identical to SEQ ID NO: 108524
  misc_feature (1)..(1478): Ceres Seq. ID no. 13667779
  misc_feature (1)..(1478): Ortholog of  Ceres SEQ ID NO 15176325 as cited in SEQ ID NO 52802
  misc_feature (1)..(1478): Ortholog of  Ceres SEQ ID NO 15176313 as cited in SEQ ID NO 52831

SEQ ID NO: 119764 - protein, 456 aa, Arabidopsis thaliana; identical to SEQ ID NO: 108525
  peptide (1)..(456): Ceres Seq. ID no. 13667780

SEQ ID NO: 119765 - protein, 439 aa, Arabidopsis thaliana; identical to SEQ ID NO: 108526
  peptide (1)..(439): Ceres Seq. ID no. 13667781

SEQ ID NO: 119766 - protein, 433 aa, Arabidopsis thaliana; identical to SEQ ID NO: 108527
  peptide (1)..(433): Ceres Seq. ID no. 13667782

SEQ ID NO: 119767 - DNA, 793 bp, Arabidopsis thaliana; identical to SEQ ID NO: 108528
  misc_feature (1)..(793): Ceres Seq. ID no. 13667786
  misc_feature (1)..(793): Ortholog of  Ceres SEQ ID NO 12610267 as cited in SEQ ID NO 51993
  misc_feature (1)..(793): Ortholog of  Ceres SEQ ID NO 13495070 as cited in SEQ ID NO 53216
  misc_feature (1)..(793): Ortholog of  Ceres SEQ ID NO 13661333 as cited in SEQ ID NO 61620
  misc_feature (1)..(793): Ortholog of  Ceres SEQ ID NO 13596812 as cited in SEQ ID NO 62283
  misc_feature (1)..(793): Ortholog of  Ceres SEQ ID NO 13623021 as cited in SEQ ID NO 0

SEQ ID NO: 119768 - protein, 143 aa, Arabidopsis thaliana; identical to SEQ ID NO: 36262
  peptide (1)..(143): Ceres Seq. ID no. 13667787

SEQ ID NO: 119769 - protein, 141 aa, Arabidopsis thaliana; identical to SEQ ID NO: 36263
  peptide (1)..(141): Ceres Seq. ID no. 13667788

SEQ ID NO: 119770 - protein, 137 aa, Arabidopsis thaliana; identical to SEQ ID NO: 36264
  peptide (1)..(137): Ceres Seq. ID no. 13667789

SEQ ID NO: 119771 - DNA, 903 bp, Arabidopsis thaliana; identical to SEQ ID NO: 108532
  misc_feature (1)..(903): Ceres Seq. ID no. 13667790
  misc_feature (1)..(903): Ortholog of  Ceres SEQ ID NO 13597542 as cited in SEQ ID NO 64986

SEQ ID NO: 119772 - protein, 239 aa, Arabidopsis thaliana; identical to SEQ ID NO: 108533
  peptide (1)..(239): Ceres Seq. ID no. 13667791

SEQ ID NO: 119773 - protein, 223 aa, Arabidopsis thaliana; identical to SEQ ID NO: 108534
  peptide (1)..(223): Ceres Seq. ID no. 13667792

SEQ ID NO: 119774 - protein, 201 aa, Arabidopsis thaliana; identical to SEQ ID NO: 108535
  peptide (1)..(201): Ceres Seq. ID no. 13667793

SEQ ID NO: 119775 - DNA, 987 bp, Arabidopsis thaliana; identical to SEQ ID NO: 108536
  misc_feature (1)..(987): Ceres Seq. ID no. 13667797
  misc_feature (1)..(987): Ortholog of  Ceres SEQ ID NO 13503499 as cited in SEQ ID NO 68684

SEQ ID NO: 119776 - protein, 267 aa, Arabidopsis thaliana; identical to SEQ ID NO: 108537
  peptide (1)..(267): Ceres Seq. ID no. 13667798

SEQ ID NO: 119777 - DNA, 954 bp, Arabidopsis thaliana; identical to SEQ ID NO: 108538
  misc_feature (1)..(954): Ceres Seq. ID no. 13667799
  misc_feature (1)..(954): Ortholog of  Ceres SEQ ID NO 12557432 as cited in SEQ ID NO 92
  misc_feature (1)..(954): Ortholog of  Ceres SEQ ID NO 14305097 as cited in SEQ ID NO 0

SEQ ID NO: 119778 - protein, 267 aa, Arabidopsis thaliana; identical to SEQ ID NO: 108539
  peptide (1)..(267): Ceres Seq. ID no. 13667800

SEQ ID NO: 119779 - protein, 252 aa, Arabidopsis thaliana; identical to SEQ ID NO: 35616
  peptide (1)..(252): Ceres Seq. ID no. 13667801

SEQ ID NO: 119780 - protein, 190 aa, Arabidopsis thaliana; identical to SEQ ID NO: 108541
  peptide (1)..(190): Ceres Seq. ID no. 13667802

SEQ ID NO: 119781 - DNA, 1304 bp, Arabidopsis thaliana; identical to SEQ ID NO: 108542
  misc_feature (1)..(1304): Ceres Seq. ID no. 13667803
  misc_feature (1)..(1304): Ortholog of  Ceres SEQ ID NO 15179926 as cited in SEQ ID NO 57010
  misc_feature (1)..(1304): Ortholog of  Ceres SEQ ID NO 14316075 as cited in SEQ ID NO 60059

SEQ ID NO: 119782 - protein, 346 aa, Arabidopsis thaliana; identical to SEQ ID NO: 24734
  peptide (1)..(346): Ceres Seq. ID no. 13667804

SEQ ID NO: 119783 - protein, 315 aa, Arabidopsis thaliana; identical to SEQ ID NO: 24735
  peptide (1)..(315): Ceres Seq. ID no. 13667805

SEQ ID NO: 119784 - protein, 256 aa, Arabidopsis thaliana; identical to SEQ ID NO: 24736
  peptide (1)..(256): Ceres Seq. ID no. 13667806

SEQ ID NO: 119785 - DNA, 1952 bp, Arabidopsis thaliana; identical to SEQ ID NO: 108546
  misc_feature (1)..(1952): Ceres Seq. ID no. 13667807
  misc_feature (1)..(1952): Ortholog of  Ceres SEQ ID NO 13584744 as cited in SEQ ID NO 69137

SEQ ID NO: 119786 - protein, 540 aa, Arabidopsis thaliana; identical to SEQ ID NO: 36330
  peptide (1)..(540): Ceres Seq. ID no. 13667808

SEQ ID NO: 119787 - protein, 526 aa, Arabidopsis thaliana; identical to SEQ ID NO: 36331
  peptide (1)..(526): Ceres Seq. ID no. 13667809

SEQ ID NO: 119788 - protein, 370 aa, Arabidopsis thaliana; identical to SEQ ID NO: 36332
  peptide (1)..(370): Ceres Seq. ID no. 13667810

SEQ ID NO: 119789 - DNA, 1005 bp, Arabidopsis thaliana; identical to SEQ ID NO: 108550
  misc_feature (1)..(1005): Ceres Seq. ID no. 13667815
  misc_feature (1)..(1005): Ortholog of  Ceres SEQ ID NO 14307589 as cited in SEQ ID NO 20466
  misc_feature (1)..(1005): Ortholog of  Ceres SEQ ID NO 12611159 as cited in SEQ ID NO 59821
  misc_feature (1)..(1005): Ortholog of  Ceres SEQ ID NO 13584238 as cited in SEQ ID NO 64216
  misc_feature (1)..(1005): Ortholog of  Ceres SEQ ID NO 13661001 as cited in SEQ ID NO 67531

SEQ ID NO: 119790 - protein, 258 aa, Arabidopsis thaliana; identical to SEQ ID NO: 108551
  peptide (1)..(258): Ceres Seq. ID no. 13667816

SEQ ID NO: 119791 - protein, 235 aa, Arabidopsis thaliana; identical to SEQ ID NO: 106919
  peptide (1)..(235): Ceres Seq. ID no. 13667817

SEQ ID NO: 119792 - protein, 170 aa, Arabidopsis thaliana; identical to SEQ ID NO: 106920
  peptide (1)..(170): Ceres Seq. ID no. 13667818

SEQ ID NO: 119793 - DNA, 1392 bp, Arabidopsis thaliana; identical to SEQ ID NO: 108554
  misc_feature (1)..(1392): Ceres Seq. ID no. 13667821
  misc_feature (1)..(1392): Ortholog of  Ceres SEQ ID NO 12599421 as cited in SEQ ID NO 65135

SEQ ID NO: 119794 - protein, 328 aa, Arabidopsis thaliana; identical to SEQ ID NO: 35459
  peptide (1)..(328): Ceres Seq. ID no. 13667822

SEQ ID NO: 119795 - protein, 266 aa, Arabidopsis thaliana; identical to SEQ ID NO: 35460
  peptide (1)..(266): Ceres Seq. ID no. 13667823

SEQ ID NO: 119796 - protein, 216 aa, Arabidopsis thaliana; identical to SEQ ID NO: 35461
  peptide (1)..(216): Ceres Seq. ID no. 13667824

SEQ ID NO: 119797 - DNA, 1122 bp, Arabidopsis thaliana; identical to SEQ ID NO: 108558
  misc_feature (1)..(1122): Ceres Seq. ID no. 13667833
  misc_feature (1)..(1122): Ortholog of  Ceres SEQ ID NO 15175048 as cited in SEQ ID NO 59975
  misc_feature (1)..(1122): Ortholog of  Ceres SEQ ID NO 13597333 as cited in SEQ ID NO 63974
  misc_feature (1)..(1122): Ortholog of  Ceres SEQ ID NO 13599307 as cited in SEQ ID NO 0
  misc_feature (1)..(1122): Ortholog of  Ceres SEQ ID NO 15179517 as cited in SEQ ID NO 0

SEQ ID NO: 119798 - protein, 310 aa, Arabidopsis thaliana; identical to SEQ ID NO: 108559
  peptide (1)..(310): Ceres Seq. ID no. 13667834

SEQ ID NO: 119799 - protein, 263 aa, Arabidopsis thaliana; identical to SEQ ID NO: 108560
  peptide (1)..(263): Ceres Seq. ID no. 13667835

SEQ ID NO: 119800 - protein, 221 aa, Arabidopsis thaliana; identical to SEQ ID NO: 108561
  peptide (1)..(221): Ceres Seq. ID no. 13667836

SEQ ID NO: 119801 - DNA, 1298 bp, Arabidopsis thaliana; identical to SEQ ID NO: 108562
  misc_feature (1)..(1298): Ceres Seq. ID no. 13667837
  misc_feature (1)..(1298): Ortholog of  Ceres SEQ ID NO 15178181 as cited in SEQ ID NO 58740
  misc_feature (1)..(1298): Ortholog of  Ceres SEQ ID NO 12614739 as cited in SEQ ID NO 68587

SEQ ID NO: 119802 - protein, 388 aa, Arabidopsis thaliana; identical to SEQ ID NO: 108563
  peptide (1)..(388): Ceres Seq. ID no. 13667838

SEQ ID NO: 119803 - protein, 353 aa, Arabidopsis thaliana; identical to SEQ ID NO: 78395
  peptide (1)..(353): Ceres Seq. ID no. 13667839

SEQ ID NO: 119804 - DNA, 1346 bp, Arabidopsis thaliana; identical to SEQ ID NO: 108565
  misc_feature (1)..(1346): Ceres Seq. ID no. 13667842
  misc_feature (1)..(1346): Ortholog of  Ceres SEQ ID NO 15225046 as cited in SEQ ID NO 57061
  misc_feature (1)..(1346): Ortholog of  Ceres SEQ ID NO 15173586 as cited in SEQ ID NO 61901
  misc_feature (1)..(1346): Ortholog of  Ceres SEQ ID NO 15179881 as cited in SEQ ID NO 66861

SEQ ID NO: 119805 - protein, 225 aa, Arabidopsis thaliana; identical to SEQ ID NO: 108566
  peptide (1)..(225): Ceres Seq. ID no. 13667843

SEQ ID NO: 119806 - protein, 223 aa, Arabidopsis thaliana; identical to SEQ ID NO: 108567
  peptide (1)..(223): Ceres Seq. ID no. 13667844

SEQ ID NO: 119807 - protein, 203 aa, Arabidopsis thaliana; identical to SEQ ID NO: 108568
  peptide (1)..(203): Ceres Seq. ID no. 13667845

SEQ ID NO: 119808 - DNA, 1183 bp, Arabidopsis thaliana; identical to SEQ ID NO: 108569
  misc_feature (1)..(1183): Ceres Seq. ID no. 13667846
  misc_feature (1)..(1183): Ortholog of  Ceres SEQ ID NO 15177055 as cited in SEQ ID NO 57450
  misc_feature (1)..(1183): Ortholog of  Ceres SEQ ID NO 12615854 as cited in SEQ ID NO 62880

SEQ ID NO: 119809 - protein, 268 aa, Arabidopsis thaliana; identical to SEQ ID NO: 29132
  peptide (1)..(268): Ceres Seq. ID no. 13667847

SEQ ID NO: 119810 - DNA, 1438 bp, Arabidopsis thaliana; identical to SEQ ID NO: 108571
  misc_feature (1)..(1438): Ceres Seq. ID no. 13667848
  misc_feature (1)..(1438): Ortholog of  Ceres SEQ ID NO 14313264 as cited in SEQ ID NO 67300
  misc_feature (1)..(1438): Ortholog of  Ceres SEQ ID NO 14302824 as cited in SEQ ID NO 67794

SEQ ID NO: 119811 - protein, 367 aa, Arabidopsis thaliana; identical to SEQ ID NO: 108572
  peptide (1)..(367): Ceres Seq. ID no. 13667849

SEQ ID NO: 119812 - protein, 339 aa, Arabidopsis thaliana; identical to SEQ ID NO: 108573
  peptide (1)..(339): Ceres Seq. ID no. 13667850

SEQ ID NO: 119813 - protein, 308 aa, Arabidopsis thaliana; identical to SEQ ID NO: 108574
  peptide (1)..(308): Ceres Seq. ID no. 13667851

SEQ ID NO: 119814 - DNA, 1379 bp, Arabidopsis thaliana; identical to SEQ ID NO: 108575
  misc_feature (1)..(1379): Ceres Seq. ID no. 13667852
  misc_feature (1)..(1379): Ortholog of  Ceres SEQ ID NO 14313264 as cited in SEQ ID NO 67300
  misc_feature (1)..(1379): Ortholog of  Ceres SEQ ID NO 14302824 as cited in SEQ ID NO 67794

SEQ ID NO: 119815 - protein, 389 aa, Arabidopsis thaliana; identical to SEQ ID NO: 108576
  peptide (1)..(389): Ceres Seq. ID no. 13667853

SEQ ID NO: 119816 - protein, 367 aa, Arabidopsis thaliana; identical to SEQ ID NO: 108577
  peptide (1)..(367): Ceres Seq. ID no. 13667854

SEQ ID NO: 119817 - protein, 339 aa, Arabidopsis thaliana; identical to SEQ ID NO: 108578
  peptide (1)..(339): Ceres Seq. ID no. 13667855

SEQ ID NO: 119818 - DNA, 949 bp, Arabidopsis thaliana; identical to SEQ ID NO: 108579
  misc_feature (1)..(949): Ceres Seq. ID no. 13667856
  misc_feature (1)..(949): Ortholog of  Ceres SEQ ID NO 14312572 as cited in SEQ ID NO 55151

SEQ ID NO: 119819 - protein, 230 aa, Arabidopsis thaliana; identical to SEQ ID NO: 108580
  peptide (1)..(230): Ceres Seq. ID no. 13667857

SEQ ID NO: 119820 - protein, 218 aa, Arabidopsis thaliana; identical to SEQ ID NO: 108581
  peptide (1)..(218): Ceres Seq. ID no. 13667858

SEQ ID NO: 119821 - protein, 159 aa, Arabidopsis thaliana; identical to SEQ ID NO: 47292
  peptide (1)..(159): Ceres Seq. ID no. 13667859

SEQ ID NO: 119822 - DNA, 1179 bp, Arabidopsis thaliana; identical to SEQ ID NO: 108583
  misc_feature (1)..(1179): Ceres Seq. ID no. 13667860
  misc_feature (1)..(1179): Ortholog of  Ceres SEQ ID NO 14314534 as cited in SEQ ID NO 52434
  misc_feature (1)..(1179): Ortholog of  Ceres SEQ ID NO 12619999 as cited in SEQ ID NO 66123
  misc_feature (1)..(1179): Ortholog of  Ceres SEQ ID NO 13656436 as cited in SEQ ID NO 69154

SEQ ID NO: 119823 - protein, 217 aa, Arabidopsis thaliana; identical to SEQ ID NO: 23142
  peptide (1)..(217): Ceres Seq. ID no. 13667861

SEQ ID NO: 119824 - DNA, 2178 bp, Arabidopsis thaliana; identical to SEQ ID NO: 108585
  misc_feature (1)..(2178): Ceres Seq. ID no. 13667862
  misc_feature (1)..(2178): Ortholog of  Ceres SEQ ID NO 15174638 as cited in SEQ ID NO 53185
  misc_feature (1)..(2178): Ortholog of  Ceres SEQ ID NO 13657460 as cited in SEQ ID NO 66115
  misc_feature (1)..(2178): Ortholog of  Ceres SEQ ID NO 13659394 as cited in SEQ ID NO 67049

SEQ ID NO: 119825 - protein, 587 aa, Arabidopsis thaliana; identical to SEQ ID NO: 108586
  peptide (1)..(587): Ceres Seq. ID no. 13667863

SEQ ID NO: 119826 - protein, 559 aa, Arabidopsis thaliana; identical to SEQ ID NO: 108587
  peptide (1)..(559): Ceres Seq. ID no. 13667864

SEQ ID NO: 119827 - protein, 558 aa, Arabidopsis thaliana; identical to SEQ ID NO: 108588
  peptide (1)..(558): Ceres Seq. ID no. 13667865

SEQ ID NO: 119828 - DNA, 1286 bp, Arabidopsis thaliana; identical to SEQ ID NO: 108589
  misc_feature (1)..(1286): Ceres Seq. ID no. 13667873
  misc_feature (1)..(1286): Ortholog of  Ceres SEQ ID NO 15177854 as cited in SEQ ID NO 51851
  misc_feature (1)..(1286): Ortholog of  Ceres SEQ ID NO 15177087 as cited in SEQ ID NO 51932
  misc_feature (1)..(1286): Ortholog of  Ceres SEQ ID NO 13662937 as cited in SEQ ID NO 64415
  misc_feature (1)..(1286): Ortholog of  Ceres SEQ ID NO 13595984 as cited in SEQ ID NO 68340
  misc_feature (1)..(1286): Ortholog of  Ceres SEQ ID NO 12635014 as cited in SEQ ID NO 0

SEQ ID NO: 119829 - protein, 370 aa, Arabidopsis thaliana; identical to SEQ ID NO: 108590
  peptide (1)..(370): Ceres Seq. ID no. 13667874

SEQ ID NO: 119830 - protein, 353 aa, Arabidopsis thaliana; identical to SEQ ID NO: 108591
  peptide (1)..(353): Ceres Seq. ID no. 13667875

SEQ ID NO: 119831 - protein, 239 aa, Arabidopsis thaliana; identical to SEQ ID NO: 24534
  peptide (1)..(239): Ceres Seq. ID no. 13667876

SEQ ID NO: 119832 - DNA, 2183 bp, Arabidopsis thaliana; identical to SEQ ID NO: 108593
  misc_feature (1)..(2183): Ceres Seq. ID no. 13667877
  misc_feature (1)..(2183): Ortholog of  Ceres SEQ ID NO 15174638 as cited in SEQ ID NO 53185
  misc_feature (1)..(2183): Ortholog of  Ceres SEQ ID NO 13657460 as cited in SEQ ID NO 66115
  misc_feature (1)..(2183): Ortholog of  Ceres SEQ ID NO 13659394 as cited in SEQ ID NO 67049

SEQ ID NO: 119833 - protein, 587 aa, Arabidopsis thaliana; identical to SEQ ID NO: 47148
  peptide (1)..(587): Ceres Seq. ID no. 13667878

SEQ ID NO: 119834 - protein, 559 aa, Arabidopsis thaliana; identical to SEQ ID NO: 47149
  peptide (1)..(559): Ceres Seq. ID no. 13667879

SEQ ID NO: 119835 - protein, 558 aa, Arabidopsis thaliana; identical to SEQ ID NO: 47150
  peptide (1)..(558): Ceres Seq. ID no. 13667880

SEQ ID NO: 119836 - DNA, 1388 bp, Arabidopsis thaliana; identical to SEQ ID NO: 108597
  misc_feature (1)..(1388): Ceres Seq. ID no. 13667888
  misc_feature (1)..(1388): Ortholog of  Ceres SEQ ID NO 12617323 as cited in SEQ ID NO 64129

SEQ ID NO: 119837 - protein, 389 aa, Arabidopsis thaliana; identical to SEQ ID NO: 108598
  peptide (1)..(389): Ceres Seq. ID no. 13667889

SEQ ID NO: 119838 - protein, 373 aa, Arabidopsis thaliana; identical to SEQ ID NO: 108599
  peptide (1)..(373): Ceres Seq. ID no. 13667890

SEQ ID NO: 119839 - protein, 289 aa, Arabidopsis thaliana; identical to SEQ ID NO: 28616
  peptide (1)..(289): Ceres Seq. ID no. 13667891

SEQ ID NO: 119840 - DNA, 1538 bp, Arabidopsis thaliana; identical to SEQ ID NO: 108601
  misc_feature (1)..(1538): Ceres Seq. ID no. 13667894
  misc_feature (1)..(1538): Ortholog of  Ceres SEQ ID NO 15175898 as cited in SEQ ID NO 57344

SEQ ID NO: 119841 - protein, 444 aa, Arabidopsis thaliana; identical to SEQ ID NO: 108602
  peptide (1)..(444): Ceres Seq. ID no. 13667895

SEQ ID NO: 119842 - protein, 411 aa, Arabidopsis thaliana; identical to SEQ ID NO: 49352
  peptide (1)..(411): Ceres Seq. ID no. 13667896

SEQ ID NO: 119843 - protein, 347 aa, Arabidopsis thaliana; identical to SEQ ID NO: 49353
  peptide (1)..(347): Ceres Seq. ID no. 13667897

SEQ ID NO: 119844 - DNA, 1415 bp, Arabidopsis thaliana; identical to SEQ ID NO: 108605
  misc_feature (1)..(1415): Ceres Seq. ID no. 13667905
  misc_feature (1)..(1415): Ortholog of  Ceres SEQ ID NO 15171430 as cited in SEQ ID NO 51500
  misc_feature (1)..(1415): Ortholog of  Ceres SEQ ID NO 15172476 as cited in SEQ ID NO 54945
  misc_feature (1)..(1415): Ortholog of  Ceres SEQ ID NO 15176106 as cited in SEQ ID NO 60324
  misc_feature (1)..(1415): Ortholog of  Ceres SEQ ID NO 13654989 as cited in SEQ ID NO 63117
  misc_feature (1)..(1415): Ortholog of  Ceres SEQ ID NO 13584744 as cited in SEQ ID NO 69137

SEQ ID NO: 119845 - protein, 410 aa, Arabidopsis thaliana; identical to SEQ ID NO: 49420
  peptide (1)..(410): Ceres Seq. ID no. 13667906

SEQ ID NO: 119846 - protein, 257 aa, Arabidopsis thaliana; identical to SEQ ID NO: 49421
  peptide (1)..(257): Ceres Seq. ID no. 13667907

SEQ ID NO: 119847 - DNA, 1187 bp, Arabidopsis thaliana; identical to SEQ ID NO: 108608
  misc_feature (1)..(1187): Ceres Seq. ID no. 13667908
  misc_feature (1)..(1187): Ortholog of  Ceres SEQ ID NO 13503476 as cited in SEQ ID NO 61978
  misc_feature (1)..(1187): Ortholog of  Ceres SEQ ID NO 12578438 as cited in SEQ ID NO 62201
  misc_feature (1)..(1187): Ortholog of  Ceres SEQ ID NO 12617675 as cited in SEQ ID NO 64656

SEQ ID NO: 119848 - protein, 333 aa, Arabidopsis thaliana; identical to SEQ ID NO: 30673
  peptide (1)..(333): Ceres Seq. ID no. 13667909

SEQ ID NO: 119849 - protein, 323 aa, Arabidopsis thaliana; identical to SEQ ID NO: 30674
  peptide (1)..(323): Ceres Seq. ID no. 13667910

SEQ ID NO: 119850 - protein, 238 aa, Arabidopsis thaliana; identical to SEQ ID NO: 30675
  peptide (1)..(238): Ceres Seq. ID no. 13667911

SEQ ID NO: 119851 - DNA, 1362 bp, Arabidopsis thaliana; identical to SEQ ID NO: 108612
  misc_feature (1)..(1362): Ceres Seq. ID no. 13667920
  misc_feature (1)..(1362): Ortholog of  Ceres SEQ ID NO 15177750 as cited in SEQ ID NO 57772
  misc_feature (1)..(1362): Ortholog of  Ceres SEQ ID NO 13596581 as cited in SEQ ID NO 62420
  misc_feature (1)..(1362): Ortholog of  Ceres SEQ ID NO 13591273 as cited in SEQ ID NO 65904
  misc_feature (1)..(1362): Ortholog of  Ceres SEQ ID NO 13623086 as cited in SEQ ID NO 0

SEQ ID NO: 119852 - protein, 404 aa, Arabidopsis thaliana; identical to SEQ ID NO: 108613
  peptide (1)..(404): Ceres Seq. ID no. 13667921

SEQ ID NO: 119853 - protein, 379 aa, Arabidopsis thaliana; identical to SEQ ID NO: 108614
  peptide (1)..(379): Ceres Seq. ID no. 13667922

SEQ ID NO: 119854 - protein, 255 aa, Arabidopsis thaliana; identical to SEQ ID NO: 108615
  peptide (1)..(255): Ceres Seq. ID no. 13667923

SEQ ID NO: 119855 - DNA, 846 bp, Arabidopsis thaliana; identical to SEQ ID NO: 108616
  misc_feature (1)..(846): Ceres Seq. ID no. 13667931
  misc_feature (1)..(846): Ortholog of  Ceres SEQ ID NO 13638595 as cited in SEQ ID NO 52050
  misc_feature (1)..(846): Ortholog of  Ceres SEQ ID NO 14301870 as cited in SEQ ID NO 61501
  misc_feature (1)..(846): Ortholog of  Ceres SEQ ID NO 12583993 as cited in SEQ ID NO 68098

SEQ ID NO: 119856 - protein, 225 aa, Arabidopsis thaliana; identical to SEQ ID NO: 108617
  peptide (1)..(225): Ceres Seq. ID no. 13667932

SEQ ID NO: 119857 - protein, 208 aa, Arabidopsis thaliana; identical to SEQ ID NO: 108618
  peptide (1)..(208): Ceres Seq. ID no. 13667933

SEQ ID NO: 119858 - DNA, 712 bp, Arabidopsis thaliana; identical to SEQ ID NO: 108619
  misc_feature (1)..(712): Ceres Seq. ID no. 13667941
  misc_feature (1)..(712): Ortholog of  Ceres SEQ ID NO 15176321 as cited in SEQ ID NO 52814
  misc_feature (1)..(712): Ortholog of  Ceres SEQ ID NO 12563124 as cited in SEQ ID NO 57104
  misc_feature (1)..(712): Ortholog of  Ceres SEQ ID NO 13598373 as cited in SEQ ID NO 62185
  misc_feature (1)..(712): Ortholog of  Ceres SEQ ID NO 12584664 as cited in SEQ ID NO 62232
  misc_feature (1)..(712): Ortholog of  Ceres SEQ ID NO 12617639 as cited in SEQ ID NO 65219
  misc_feature (1)..(712): Ortholog of  Ceres SEQ ID NO 15179982 as cited in SEQ ID NO 0

SEQ ID NO: 119859 - protein, 180 aa, Arabidopsis thaliana; identical to SEQ ID NO: 108620
  peptide (1)..(180): Ceres Seq. ID no. 13667942

SEQ ID NO: 119860 - protein, 169 aa, Arabidopsis thaliana; identical to SEQ ID NO: 22059
  peptide (1)..(169): Ceres Seq. ID no. 13667943

SEQ ID NO: 119861 - protein, 110 aa, Arabidopsis thaliana; identical to SEQ ID NO: 22060
  peptide (1)..(110): Ceres Seq. ID no. 13667944

SEQ ID NO: 119862 - DNA, 747 bp, Arabidopsis thaliana; identical to SEQ ID NO: 108623
  misc_feature (1)..(747): Ceres Seq. ID no. 13667945
  misc_feature (1)..(747): Ortholog of  Ceres SEQ ID NO 15176321 as cited in SEQ ID NO 52814
  misc_feature (1)..(747): Ortholog of  Ceres SEQ ID NO 12563124 as cited in SEQ ID NO 57104
  misc_feature (1)..(747): Ortholog of  Ceres SEQ ID NO 13598373 as cited in SEQ ID NO 62185
  misc_feature (1)..(747): Ortholog of  Ceres SEQ ID NO 12584664 as cited in SEQ ID NO 62232
  misc_feature (1)..(747): Ortholog of  Ceres SEQ ID NO 12617639 as cited in SEQ ID NO 65219

SEQ ID NO: 119863 - protein, 176 aa, Arabidopsis thaliana; identical to SEQ ID NO: 76877
  peptide (1)..(176): Ceres Seq. ID no. 13667946

SEQ ID NO: 119864 - protein, 115 aa, Arabidopsis thaliana; identical to SEQ ID NO: 76878
  peptide (1)..(115): Ceres Seq. ID no. 13667947

SEQ ID NO: 119865 - protein, 108 aa, Arabidopsis thaliana; identical to SEQ ID NO: 76879
  peptide (1)..(108): Ceres Seq. ID no. 13667948

SEQ ID NO: 119866 - DNA, 823 bp, Arabidopsis thaliana; identical to SEQ ID NO: 108627
  misc_feature (1)..(823): Ceres Seq. ID no. 13667949
  misc_feature (1)..(823): Ortholog of  Ceres SEQ ID NO 14316176 as cited in SEQ ID NO 57814
  misc_feature (1)..(823): Ortholog of  Ceres SEQ ID NO 13660037 as cited in SEQ ID NO 66990

SEQ ID NO: 119867 - protein, 160 aa, Arabidopsis thaliana; identical to SEQ ID NO: 35742
  peptide (1)..(160): Ceres Seq. ID no. 13667950

SEQ ID NO: 119868 - protein, 121 aa, Arabidopsis thaliana; identical to SEQ ID NO: 35743
  peptide (1)..(121): Ceres Seq. ID no. 13667951

SEQ ID NO: 119869 - protein, 98 aa, Arabidopsis thaliana; identical to SEQ ID NO: 35744
  peptide (1)..(98): Ceres Seq. ID no. 13667952

SEQ ID NO: 119870 - DNA, 1948 bp, Arabidopsis thaliana; identical to SEQ ID NO: 108631
  misc_feature (1)..(1948): Ceres Seq. ID no. 13667957
  misc_feature (1)..(1948): Ortholog of  Ceres SEQ ID NO 13594037 as cited in SEQ ID NO 55666
  misc_feature (1)..(1948): Ortholog of  Ceres SEQ ID NO 13657707 as cited in SEQ ID NO 66407

SEQ ID NO: 119871 - protein, 586 aa, Arabidopsis thaliana; identical to SEQ ID NO: 37485
  peptide (1)..(586): Ceres Seq. ID no. 13667958

SEQ ID NO: 119872 - protein, 369 aa, Arabidopsis thaliana; identical to SEQ ID NO: 37486
  peptide (1)..(369): Ceres Seq. ID no. 13667959

SEQ ID NO: 119873 - protein, 334 aa, Arabidopsis thaliana; identical to SEQ ID NO: 37487
  peptide (1)..(334): Ceres Seq. ID no. 13667960

SEQ ID NO: 119874 - DNA, 1847 bp, Arabidopsis thaliana; identical to SEQ ID NO: 108635
  misc_feature (1)..(1847): Ceres Seq. ID no. 13667977
  misc_feature (1)..(1847): Ortholog of  Ceres SEQ ID NO 14313714 as cited in SEQ ID NO 54084

SEQ ID NO: 119875 - protein, 466 aa, Arabidopsis thaliana; identical to SEQ ID NO: 108636
  peptide (1)..(466): Ceres Seq. ID no. 13667978

SEQ ID NO: 119876 - protein, 420 aa, Arabidopsis thaliana; identical to SEQ ID NO: 108637
  peptide (1)..(420): Ceres Seq. ID no. 13667979

SEQ ID NO: 119877 - protein, 296 aa, Arabidopsis thaliana; identical to SEQ ID NO: 108638
  peptide (1)..(296): Ceres Seq. ID no. 13667980

SEQ ID NO: 119878 - DNA, 1535 bp, Arabidopsis thaliana; identical to SEQ ID NO: 108639
  misc_feature (1)..(1535): Ceres Seq. ID no. 13667985
  misc_feature (1)..(1535): Ortholog of  Ceres SEQ ID NO 14305026 as cited in SEQ ID NO 52980
  misc_feature (1)..(1535): Ortholog of  Ceres SEQ ID NO 13595598 as cited in SEQ ID NO 56822
  misc_feature (1)..(1535): Ortholog of  Ceres SEQ ID NO 13655712 as cited in SEQ ID NO 63394

SEQ ID NO: 119879 - protein, 312 aa, Arabidopsis thaliana; identical to SEQ ID NO: 40748
  peptide (1)..(312): Ceres Seq. ID no. 13667986

SEQ ID NO: 119880 - protein, 267 aa, Arabidopsis thaliana; identical to SEQ ID NO: 40749
  peptide (1)..(267): Ceres Seq. ID no. 13667987

SEQ ID NO: 119881 - DNA, 2209 bp, Arabidopsis thaliana; identical to SEQ ID NO: 108642
  misc_feature (1)..(2209): Ceres Seq. ID no. 13667992
  misc_feature (1)..(2209): Ortholog of  Ceres SEQ ID NO 14303276 as cited in SEQ ID NO 1264
  misc_feature (1)..(2209): Ortholog of  Ceres SEQ ID NO 15170536 as cited in SEQ ID NO 52791
  misc_feature (1)..(2209): Ortholog of  Ceres SEQ ID NO 15171813 as cited in SEQ ID NO 57309
  misc_feature (1)..(2209): Ortholog of  Ceres SEQ ID NO 14314378 as cited in SEQ ID NO 57601
  misc_feature (1)..(2209): Ortholog of  Ceres SEQ ID NO 12465083 as cited in SEQ ID NO 68239

SEQ ID NO: 119882 - protein, 651 aa, Arabidopsis thaliana; identical to SEQ ID NO: 108643
  peptide (1)..(651): Ceres Seq. ID no. 13667993

SEQ ID NO: 119883 - protein, 588 aa, Arabidopsis thaliana; identical to SEQ ID NO: 108644
  peptide (1)..(588): Ceres Seq. ID no. 13667994

SEQ ID NO: 119884 - protein, 562 aa, Arabidopsis thaliana; identical to SEQ ID NO: 108645
  peptide (1)..(562): Ceres Seq. ID no. 13667995

SEQ ID NO: 119885 - DNA, 528 bp, Arabidopsis thaliana; identical to SEQ ID NO: 108646
  misc_feature (1)..(528): Ceres Seq. ID no. 13667996
  misc_feature (1)..(528): Ortholog of  Ceres SEQ ID NO 15172828 as cited in SEQ ID NO 60174

SEQ ID NO: 119886 - protein, 118 aa, Arabidopsis thaliana; identical to SEQ ID NO: 26633
  peptide (1)..(118): Ceres Seq. ID no. 13667997

SEQ ID NO: 119887 - protein, 67 aa, Arabidopsis thaliana; identical to SEQ ID NO: 26634
  peptide (1)..(67): Ceres Seq. ID no. 13667998

SEQ ID NO: 119888 - DNA, 1208 bp, Arabidopsis thaliana; identical to SEQ ID NO: 108649
  misc_feature (1)..(1208): Ceres Seq. ID no. 13668003
  misc_feature (1)..(1208): Ortholog of  Ceres SEQ ID NO 15169655 as cited in SEQ ID NO 64922
  misc_feature (1)..(1208): Ortholog of  Ceres SEQ ID NO 13596004 as cited in SEQ ID NO 68212

SEQ ID NO: 119889 - protein, 363 aa, Arabidopsis thaliana; identical to SEQ ID NO: 108650
  peptide (1)..(363): Ceres Seq. ID no. 13668004

SEQ ID NO: 119890 - protein, 328 aa, Arabidopsis thaliana; identical to SEQ ID NO: 108651
  peptide (1)..(328): Ceres Seq. ID no. 13668005

SEQ ID NO: 119891 - protein, 314 aa, Arabidopsis thaliana; identical to SEQ ID NO: 108652
  peptide (1)..(314): Ceres Seq. ID no. 13668006

SEQ ID NO: 119892 - DNA, 1050 bp, Arabidopsis thaliana; identical to SEQ ID NO: 108653
  misc_feature (1)..(1050): Ceres Seq. ID no. 13668011
  misc_feature (1)..(1050): Ortholog of  Ceres SEQ ID NO 14303417 as cited in SEQ ID NO 54923
  misc_feature (1)..(1050): Ortholog of  Ceres SEQ ID NO 12635513 as cited in SEQ ID NO 0
  misc_feature (1)..(1050): Ortholog of  Ceres SEQ ID NO 15179044 as cited in SEQ ID NO 0

SEQ ID NO: 119893 - protein, 251 aa, Arabidopsis thaliana; identical to SEQ ID NO: 26326
  peptide (1)..(251): Ceres Seq. ID no. 13668012

SEQ ID NO: 119894 - protein, 148 aa, Arabidopsis thaliana; identical to SEQ ID NO: 26327
  peptide (1)..(148): Ceres Seq. ID no. 13668013

SEQ ID NO: 119895 - protein, 142 aa, Arabidopsis thaliana; identical to SEQ ID NO: 26328
  peptide (1)..(142): Ceres Seq. ID no. 13668014

SEQ ID NO: 119896 - DNA, 963 bp, Arabidopsis thaliana; identical to SEQ ID NO: 108657
  misc_feature (1)..(963): Ceres Seq. ID no. 13668015
  misc_feature (1)..(963): Ortholog of  Ceres SEQ ID NO 13581804 as cited in SEQ ID NO 51424
  misc_feature (1)..(963): Ortholog of  Ceres SEQ ID NO 14310890 as cited in SEQ ID NO 54290
  misc_feature (1)..(963): Ortholog of  Ceres SEQ ID NO 13663874 as cited in SEQ ID NO 67003

SEQ ID NO: 119897 - protein, 246 aa, Arabidopsis thaliana; identical to SEQ ID NO: 102048
  peptide (1)..(246): Ceres Seq. ID no. 13668016

SEQ ID NO: 119898 - DNA, 1665 bp, Arabidopsis thaliana; identical to SEQ ID NO: 108659
  misc_feature (1)..(1665): Ceres Seq. ID no. 13668024
  misc_feature (1)..(1665): Ortholog of  Ceres SEQ ID NO 14307257 as cited in SEQ ID NO 54628

SEQ ID NO: 119899 - protein, 485 aa, Arabidopsis thaliana; identical to SEQ ID NO: 24657
  peptide (1)..(485): Ceres Seq. ID no. 13668025

SEQ ID NO: 119900 - protein, 397 aa, Arabidopsis thaliana; identical to SEQ ID NO: 24658
  peptide (1)..(397): Ceres Seq. ID no. 13668026

SEQ ID NO: 119901 - protein, 377 aa, Arabidopsis thaliana; identical to SEQ ID NO: 24659
  peptide (1)..(377): Ceres Seq. ID no. 13668027

SEQ ID NO: 119902 - DNA, 924 bp, Arabidopsis thaliana; identical to SEQ ID NO: 108663
  misc_feature (1)..(924): Ceres Seq. ID no. 13668028
  misc_feature (1)..(924): Ortholog of  Ceres SEQ ID NO 12563124 as cited in SEQ ID NO 57104
  misc_feature (1)..(924): Ortholog of  Ceres SEQ ID NO 12617639 as cited in SEQ ID NO 65219

SEQ ID NO: 119903 - protein, 179 aa, Arabidopsis thaliana; identical to SEQ ID NO: 84053
  peptide (1)..(179): Ceres Seq. ID no. 13668029

SEQ ID NO: 119904 - protein, 115 aa, Arabidopsis thaliana; identical to SEQ ID NO: 76878
  peptide (1)..(115): Ceres Seq. ID no. 13668030

SEQ ID NO: 119905 - protein, 108 aa, Arabidopsis thaliana; identical to SEQ ID NO: 76879
  peptide (1)..(108): Ceres Seq. ID no. 13668031

SEQ ID NO: 119906 - DNA, 1444 bp, Arabidopsis thaliana; identical to SEQ ID NO: 108667
  misc_feature (1)..(1444): Ceres Seq. ID no. 13668032
  misc_feature (1)..(1444): Ortholog of  Ceres SEQ ID NO 12625388 as cited in SEQ ID NO 63299
  misc_feature (1)..(1444): Ortholog of  Ceres SEQ ID NO 15179860 as cited in SEQ ID NO 66716

SEQ ID NO: 119907 - protein, 403 aa, Arabidopsis thaliana; identical to SEQ ID NO: 108668
  peptide (1)..(403): Ceres Seq. ID no. 13668033

SEQ ID NO: 119908 - protein, 240 aa, Arabidopsis thaliana; identical to SEQ ID NO: 108669
  peptide (1)..(240): Ceres Seq. ID no. 13668034

SEQ ID NO: 119909 - DNA, 946 bp, Arabidopsis thaliana; identical to SEQ ID NO: 108670
  misc_feature (1)..(946): Ceres Seq. ID no. 13668035
  misc_feature (1)..(946): Ortholog of  Ceres SEQ ID NO 13596902 as cited in SEQ ID NO 62521

SEQ ID NO: 119910 - protein, 230 aa, Arabidopsis thaliana; identical to SEQ ID NO: 108671
  peptide (1)..(230): Ceres Seq. ID no. 13668036

SEQ ID NO: 119911 - protein, 148 aa, Arabidopsis thaliana; identical to SEQ ID NO: 108672
  peptide (1)..(148): Ceres Seq. ID no. 13668037

SEQ ID NO: 119912 - DNA, 1364 bp, Arabidopsis thaliana; identical to SEQ ID NO: 108673
  misc_feature (1)..(1364): Ceres Seq. ID no. 13668038
  misc_feature (1)..(1364): Ortholog of  Ceres SEQ ID NO 13598548 as cited in SEQ ID NO 65227

SEQ ID NO: 119913 - protein, 383 aa, Arabidopsis thaliana; identical to SEQ ID NO: 108674
  peptide (1)..(383): Ceres Seq. ID no. 13668039

SEQ ID NO: 119914 - protein, 352 aa, Arabidopsis thaliana; identical to SEQ ID NO: 108675
  peptide (1)..(352): Ceres Seq. ID no. 13668040

SEQ ID NO: 119915 - protein, 260 aa, Arabidopsis thaliana; identical to SEQ ID NO: 108676
  peptide (1)..(260): Ceres Seq. ID no. 13668041

SEQ ID NO: 119916 - DNA, 1447 bp, Arabidopsis thaliana; identical to SEQ ID NO: 108677
  misc_feature (1)..(1447): Ceres Seq. ID no. 13668042
  misc_feature (1)..(1447): Ortholog of  Ceres SEQ ID NO 13595525 as cited in SEQ ID NO 56679
  misc_feature (1)..(1447): Ortholog of  Ceres SEQ ID NO 15226984 as cited in SEQ ID NO 62173
  misc_feature (1)..(1447): Ortholog of  Ceres SEQ ID NO 14302236 as cited in SEQ ID NO 68793

SEQ ID NO: 119917 - protein, 398 aa, Arabidopsis thaliana; identical to SEQ ID NO: 108678
  peptide (1)..(398): Ceres Seq. ID no. 13668043

SEQ ID NO: 119918 - protein, 393 aa, Arabidopsis thaliana; identical to SEQ ID NO: 108679
  peptide (1)..(393): Ceres Seq. ID no. 13668044

SEQ ID NO: 119919 - protein, 380 aa, Arabidopsis thaliana; identical to SEQ ID NO: 108680
  peptide (1)..(380): Ceres Seq. ID no. 13668045

SEQ ID NO: 119920 - DNA, 1197 bp, Arabidopsis thaliana; identical to SEQ ID NO: 108681
  misc_feature (1)..(1197): Ceres Seq. ID no. 13668054
  misc_feature (1)..(1197): Ortholog of  Ceres SEQ ID NO 15177079 as cited in SEQ ID NO 51989
  misc_feature (1)..(1197): Ortholog of  Ceres SEQ ID NO 14315354 as cited in SEQ ID NO 58232
  misc_feature (1)..(1197): Ortholog of  Ceres SEQ ID NO 13596392 as cited in SEQ ID NO 62136
  misc_feature (1)..(1197): Ortholog of  Ceres SEQ ID NO 13654360 as cited in SEQ ID NO 67980
  misc_feature (1)..(1197): Ortholog of  Ceres SEQ ID NO 13596394 as cited in SEQ ID NO 68561

SEQ ID NO: 119921 - protein, 306 aa, Arabidopsis thaliana; identical to SEQ ID NO: 23564
  peptide (1)..(306): Ceres Seq. ID no. 13668055

SEQ ID NO: 119922 - protein, 292 aa, Arabidopsis thaliana; identical to SEQ ID NO: 23565
  peptide (1)..(292): Ceres Seq. ID no. 13668056

SEQ ID NO: 119923 - protein, 227 aa, Arabidopsis thaliana; identical to SEQ ID NO: 23566
  peptide (1)..(227): Ceres Seq. ID no. 13668057

SEQ ID NO: 119924 - DNA, 1448 bp, Arabidopsis thaliana; identical to SEQ ID NO: 108685
  misc_feature (1)..(1448): Ceres Seq. ID no. 13668058
  misc_feature (1)..(1448): Ortholog of  Ceres SEQ ID NO 15177012 as cited in SEQ ID NO 56256
  misc_feature (1)..(1448): Ortholog of  Ceres SEQ ID NO 13596509 as cited in SEQ ID NO 62004
  misc_feature (1)..(1448): Ortholog of  Ceres SEQ ID NO 13500385 as cited in SEQ ID NO 67583

SEQ ID NO: 119925 - protein, 362 aa, Arabidopsis thaliana; identical to SEQ ID NO: 103144
  peptide (1)..(362): Ceres Seq. ID no. 13668059

SEQ ID NO: 119926 - protein, 353 aa, Arabidopsis thaliana; identical to SEQ ID NO: 103145
  peptide (1)..(353): Ceres Seq. ID no. 13668060

SEQ ID NO: 119927 - protein, 346 aa, Arabidopsis thaliana; identical to SEQ ID NO: 103146
  peptide (1)..(346): Ceres Seq. ID no. 13668061

SEQ ID NO: 119928 - DNA, 674 bp, Arabidopsis thaliana; identical to SEQ ID NO: 108689
  misc_feature (1)..(674): Ceres Seq. ID no. 13668062
  misc_feature (1)..(674): Ortholog of  Ceres SEQ ID NO 12474478 as cited in SEQ ID NO 96
  misc_feature (1)..(674): Ortholog of  Ceres SEQ ID NO 14309053 as cited in SEQ ID NO 0

SEQ ID NO: 119929 - protein, 168 aa, Arabidopsis thaliana; identical to SEQ ID NO: 108690
  peptide (1)..(168): Ceres Seq. ID no. 13668063

SEQ ID NO: 119930 - DNA, 1082 bp, Arabidopsis thaliana; identical to SEQ ID NO: 108691
  misc_feature (1)..(1082): Ceres Seq. ID no. 13668072
  misc_feature (1)..(1082): Ortholog of  Ceres SEQ ID NO 15178083 as cited in SEQ ID NO 56185
  misc_feature (1)..(1082): Ortholog of  Ceres SEQ ID NO 15225046 as cited in SEQ ID NO 57061
  misc_feature (1)..(1082): Ortholog of  Ceres SEQ ID NO 15179881 as cited in SEQ ID NO 66861

SEQ ID NO: 119931 - protein, 234 aa, Arabidopsis thaliana; identical to SEQ ID NO: 83919
  peptide (1)..(234): Ceres Seq. ID no. 13668073

SEQ ID NO: 119932 - protein, 232 aa, Arabidopsis thaliana; identical to SEQ ID NO: 83920
  peptide (1)..(232): Ceres Seq. ID no. 13668074

SEQ ID NO: 119933 - protein, 152 aa, Arabidopsis thaliana; identical to SEQ ID NO: 83921
  peptide (1)..(152): Ceres Seq. ID no. 13668075

SEQ ID NO: 119934 - DNA, 788 bp, Arabidopsis thaliana; identical to SEQ ID NO: 108695
  misc_feature (1)..(788): Ceres Seq. ID no. 13668079
  misc_feature (1)..(788): Ortholog of  Ceres SEQ ID NO 13593379 as cited in SEQ ID NO 20573

SEQ ID NO: 119935 - protein, 204 aa, Arabidopsis thaliana; identical to SEQ ID NO: 108696
  peptide (1)..(204): Ceres Seq. ID no. 13668080

SEQ ID NO: 119936 - protein, 130 aa, Arabidopsis thaliana; identical to SEQ ID NO: 108697
  peptide (1)..(130): Ceres Seq. ID no. 13668081

SEQ ID NO: 119937 - DNA, 796 bp, Arabidopsis thaliana; identical to SEQ ID NO: 108698
  misc_feature (1)..(796): Ceres Seq. ID no. 13668082
  misc_feature (1)..(796): Ortholog of  Ceres SEQ ID NO 15172991 as cited in SEQ ID NO 51333
  misc_feature (1)..(796): Ortholog of  Ceres SEQ ID NO 13594870 as cited in SEQ ID NO 51929
  misc_feature (1)..(796): Ortholog of  Ceres SEQ ID NO 12610679 as cited in SEQ ID NO 56077
  misc_feature (1)..(796): Ortholog of  Ceres SEQ ID NO 12635481 as cited in SEQ ID NO 0

SEQ ID NO: 119938 - protein, 141 aa, Arabidopsis thaliana; identical to SEQ ID NO: 28781
  peptide (1)..(141): Ceres Seq. ID no. 13668083

SEQ ID NO: 119939 - protein, 96 aa, Arabidopsis thaliana; identical to SEQ ID NO: 28782
  peptide (1)..(96): Ceres Seq. ID no. 13668084

SEQ ID NO: 119940 - DNA, 1636 bp, Arabidopsis thaliana; identical to SEQ ID NO: 108701
  misc_feature (1)..(1636): Ceres Seq. ID no. 13668088
  misc_feature (1)..(1636): Ortholog of  Ceres SEQ ID NO 14311731 as cited in SEQ ID NO 51632
  misc_feature (1)..(1636): Ortholog of  Ceres SEQ ID NO 14315189 as cited in SEQ ID NO 57702

SEQ ID NO: 119941 - protein, 388 aa, Arabidopsis thaliana; identical to SEQ ID NO: 108702
  peptide (1)..(388): Ceres Seq. ID no. 13668089

SEQ ID NO: 119942 - protein, 318 aa, Arabidopsis thaliana; identical to SEQ ID NO: 108703
  peptide (1)..(318): Ceres Seq. ID no. 13668090

SEQ ID NO: 119943 - protein, 315 aa, Arabidopsis thaliana; identical to SEQ ID NO: 108704
  peptide (1)..(315): Ceres Seq. ID no. 13668091

SEQ ID NO: 119944 - DNA, 3076 bp, Arabidopsis thaliana; identical to SEQ ID NO: 108705
  misc_feature (1)..(3076): Ceres Seq. ID no. 13668100
  misc_feature (1)..(3076): Ortholog of  Ceres SEQ ID NO 14308209 as cited in SEQ ID NO 58800

SEQ ID NO: 119945 - protein, 945 aa, Arabidopsis thaliana; identical to SEQ ID NO: 108706
  peptide (1)..(945): Ceres Seq. ID no. 13668101

SEQ ID NO: 119946 - protein, 917 aa, Arabidopsis thaliana; identical to SEQ ID NO: 45155
  peptide (1)..(917): Ceres Seq. ID no. 13668102

SEQ ID NO: 119947 - protein, 838 aa, Arabidopsis thaliana; identical to SEQ ID NO: 45156
  peptide (1)..(838): Ceres Seq. ID no. 13668103

SEQ ID NO: 119948 - DNA, 1243 bp, Arabidopsis thaliana; identical to SEQ ID NO: 108709
  misc_feature (1)..(1243): Ceres Seq. ID no. 13668108
  misc_feature (1)..(1243): Ortholog of  Ceres SEQ ID NO 13495070 as cited in SEQ ID NO 53216
  misc_feature (1)..(1243): Ortholog of  Ceres SEQ ID NO 13656228 as cited in SEQ ID NO 65648
  misc_feature (1)..(1243): Ortholog of  Ceres SEQ ID NO 15179618 as cited in SEQ ID NO 0

SEQ ID NO: 119949 - protein, 357 aa, Arabidopsis thaliana; identical to SEQ ID NO: 108710
  peptide (1)..(357): Ceres Seq. ID no. 13668109

SEQ ID NO: 119950 - protein, 336 aa, Arabidopsis thaliana; identical to SEQ ID NO: 26651
  peptide (1)..(336): Ceres Seq. ID no. 13668110

SEQ ID NO: 119951 - protein, 293 aa, Arabidopsis thaliana; identical to SEQ ID NO: 26652
  peptide (1)..(293): Ceres Seq. ID no. 13668111

SEQ ID NO: 119952 - DNA, 1461 bp, Arabidopsis thaliana
  misc_feature (1)..(1461): Ceres Seq. ID no. 13668112
  misc_feature (1)..(1461): Ortholog of  Ceres SEQ ID NO 13502952 as cited in SEQ ID NO 62271
  misc_feature (1)..(1461): Ortholog of  Ceres SEQ ID NO 13502973 as cited in SEQ ID NO 68052
  misc_feature (1)..(1461): Ortholog of  Ceres SEQ ID NO 13596000 as cited in SEQ ID NO 68188
atcttaaaagaaaccgaaagctaatctccaaagggaaaaagacgtgtagcagagacctatacatacacctatacattcacgttgcgtgtgataatctactgagggttctatctatattaatccttctctgcttccttcaatctaattgcaaatcaaatggatcgtcttaagctttatttctccgttttcgttttgtctttctttatcgtctcggtttcgtcgtctgatgtcaacgacggcgatgatctcgtgatccgtcaggtggttggtggagccgagcctcaggttttgacctcagaggatcacttttctctcttcaagcggaagttcgggaaggtctacgcttccaacgaggagcatgactatagattctcggttttcaaagcgaatctcaggcgagcgaggcgtcaccagaagttggatccgtcggcgactcatggtgttacgcagttctcagatctgactcggtctgagttccgtaagaagcacttgggggttagaagtggctttaagcttcctaaagatgccaacaaggctccgattctccctaccgaaaatctccctgaggattttgattggagagatcatggcgccgttactcccgtcaaaaatcagggatcttgcggctcttgctggagtttcagcgccactggagctttggaaggtgctaacttcctcgctaccggcaaactcgtcagcctcagcgaacaacagctcgtcgactgtgatcacgagtgtgatcccgaggaggcagattcctgcgactctggttgcaatggtgggctaatgaacagcgcttttgaatacaccctcaaaaccggagggctcatgaaagaagaagactatccttacaccggaaaggacggcaagacctgcaagctagacaagtccaagatcgttgcctctgtctccaacttcagtgttatctccattgatgaagaacagattgctgcaaaccttgtcaagaacggacctcttgctgtagccatcaacgctggctatatgcagacttacattggaggagtctcatgcccttacatatgcaccaggaggctcaaccacggtgtcttattggttggctatggagcggcaggttacgctccggctaggttcaaggagaagccttactggatcatcaagaactcgtggggagagacttggggtgaaaatggtttctacaaaatctgcaaaggccgtaacatttgtggtgttgacagtatggtctccactgttgcagccaccgtctcaaccaccgcccattaagcatctcgtcaataagttttaattactttggtgatttgtatgagcgagctctctttgcgctgctgactctctctatttatctctgcttcttgcttgtaaataaaatgcgttctattgagcaaaaccgtacaatgctcattagcaatgagcccactttaacaagtatcagtttatggcccaatatatgaaagttaaatt

SEQ ID NO: 119953 - protein, 368 aa, Arabidopsis thaliana; identical to SEQ ID NO: 23807
  peptide (1)..(368): Ceres Seq. ID no. 13668113

SEQ ID NO: 119954 - DNA, 1173 bp, Arabidopsis thaliana
  misc_feature (1)..(1173): Ceres Seq. ID no. 13668118
  misc_feature (1)..(1173): Ortholog of  Ceres SEQ ID NO 15178797 as cited in SEQ ID NO 1152
  misc_feature (1)..(1173): Ortholog of  Ceres SEQ ID NO 15175688 as cited in SEQ ID NO 60465
  misc_feature (1)..(1173): Ortholog of  Ceres SEQ ID NO 13495628 as cited in SEQ ID NO 60727
attgaagtctctgcttatatacaagaacttgctcattcctcaaagcatccacacataatcacgatgaagctctttgttcatctctctatcttcttctccatcctcttcatcactctcccatcttcttacagctgcaccgaaaaatgacaagaatgccctccttcaaatcaagaaagcacttggcaatcctccccttctatcctcctggaacccccgaaccgactgttgtaccggctggaccggcgtcgaatgcactaaccgtcgcgttaccggtctcagcgttacctccggcgaagtctccggtcagatctcgtaccagatcggcgacctcgttgacctccgtacactagatttcagctacctgccacacctcaccggaaacatcccacgcaccatcaccaaactcaagaacctcaacactctctacttgaagcacactagtctctccggtccgattcctgattacatcagcgagctcaagagcctcacgttcttggacctttcttttaaccaatttaccggtccaattcccggttcgctatctcagatgccgaagcttgaagccattcaaatcaacgataataagctaaccggttctataccaaactctttcggttcttttgttggcaacgtccctaatctctacttgtctaacaataagctgtcaggaaaaataccggaatcgttgtctaaatacgacttcaacgcagtggatttgtcgggaaatggtttcgaaggagatgcctttatgttcttcggacggaacaaaacaacagtacgagtggatttgtcgagaaacatgtttaatttcgatctcgtcaaggttaagttcgctagaagcatagtttcgttggatctgagccagaaccatatctacgggaagataccaccagcactgactaaactacacctcgagcatttcaacgtgagcgacaaccatctctgcggaaaaatcccaagtggcggtctacttcagacctttgaaccatctgccttcgctcacaacatctgtctttgtggaactccccttaaggcttgttaatttggtttaatcttggcggaagaataaaaataatgttgaatatgttatgatgatgtgttcattatcaccgccaaaccaagtttattgtttctttgttatgaatttaatttaatggcaagaattggttacgt

SEQ ID NO: 119955 - protein, 164 aa, Arabidopsis thaliana; identical to SEQ ID NO: 31013
  peptide (1)..(164): Ceres Seq. ID no. 13668119

SEQ ID NO: 119956 - protein, 97 aa, Arabidopsis thaliana; identical to SEQ ID NO: 84115
  peptide (1)..(97): Ceres Seq. ID no. 13668120

SEQ ID NO: 119957 - DNA, 1421 bp, Arabidopsis thaliana
  misc_feature (1)..(1421): Ceres PROMOTER 13879F
gatcggccgtgtgagttggtagcgaattaacggaaagtctaagtcaagattttttaaaaagaaatttatgtgtgaaaagaagccgttgtgtatatttatataatttagaaaatgtttcatcattttattaaaaaattaataatttgtagaagaaagaagcattttttatacataaatcatttaccttctttactgtgtttttcttcacttacttcatttttacttttttacaaaaaagtgaaaagtaaattacgtaattggtaacataaattcactttaaatttgcatatgttttgttttcttcggaaactatatcgaaaagcaaacggaaagaacttcacaaaaaaccctagctaactaaagacgcatgtgttcttcttattcttcatatatcctctgtttcttgtgttctgttttgagtcttacattttcaatatctgactctgattactatatctaaaagggaacatgaagaacttgagaccatgttaaactgtacaatgccttcaaacatggctaactaaagatacattagatggctttacagtgtgtaatgcttattatctttaggttttttaaatcccttgtattaagttatttaccaaattatgttcttgtactgcttattggcttggttgttgtgtgctttgtaaacaacacctttggctttatttcatcctttgtaaacctactggtctttgttcagctcctcttggaagtgagtttgtatgcctggaacgggttttaatggagtgtttatcgacaaaaaaaaaatgtagcttttgaaatcacagagagtagttttatattcaaattacatgcatgcaactaagtagcaacaaagttgatatggccgagttggtctaaggcgccagattaaggttctggtccgaaagggcgtgggttcaaatcccactgtcaacattctctttttctcaaattaatatttttctgcctcaatggttcaggcccaattatactagactactatcgcgactaaaatagggactagccgaattgatccggcccagtatcagttgtgtatcaccacgttatttcaaatttcaaactaagggataaagatgtcatttgacatatgagatatttttttgctccactgagatatttttctttgtcccaagataaaatatcttttctcgcatcgtcgtctttccatttgcgcattaaaccaaaaagtgtcacgtgatatgtccccaaccactacgaattttaactacagatttaaccatggttaaaccagaattcacgtaaaccgactctaaacctagaaaatatctaaaccttggttaatatctcagcccccttataaataacgagacttcgtctacatcgttctacacatctcactgctcactactctcactgtaatcccttagatcttcttttcaaatttcaggcct

SEQ ID NO: 119958 - DNA, 2049 bp, Arabidopsis thaliana
  misc_feature (1)..(2049): Ceres PROMOTER 15529F
gatcggccctttgtcttgatggctcatgaaaagcaagaaatctgcgattgaattttaaactgcttcaatgttccttcagtacatggtaaaagagtataagaagaaggatgtacatatgatgtctttgttttctggtttgcaactttcaggttccatttgagtctatggttcatcaagtgcgagaagagctaaaaacaatagcgaagggtgattacaagccaccttcggagaaaagaaaacacgggtctattgttttcgctgccatcaacttgcctgctactcaagttcacagtcttcttgaaaaggtaaccaaccaatttcttatactatcatataaaaaaacaaaaggaatattgagacaagaactcttcaactgccgaaaactaaaggttaagtatgggctttgttattaattaatagatgttattctcatcagttggctgcagcaaacccaacaatgagatcttttctagagggaaagaaaaagagcatacaggaaaaacttgaacggtctcacgtgacgctcgcccacaagagaagccatggcgtagcaactgtagccagctatagtcagcacttgaacagagaggtacccgtagagctcaccgagctcatctacaacgacaagatggctgctctaacagcccatgttggatctgtggacggagagaccgtagtctccaagaacgaatggccacatgttacattgtggacagcggaaggcgttactgcgaaagaggccaacacgttacctcagctttacttagaaggaaaggcgagccgcttggtgatagatcctccggtgtcaatctcaggtcctctggagtttttctgaatacttgattaaacatggaagtttctctcttgagggaggttgctcgtggaatgggacacatatggttgttataataaaccattccattgtcatgagattttgaggttaatatatactttacttgttcattattttatttggtgtttgaataaatgatataaatggctcttgataatctgcattcattgagatatcaaatatttactctagagaagagtgtcatatagattgatggtccacaatcaatgaaatttttgggagacgaacatgtataaccatttgcttgaataaccttaattaaaaggtgtgattaaatgatgtttgtaacatgtagtactaaacattcataaaacacaaccaacccaagaggtattgagtattcacggctaaacaggggcataatggtaatttaaagaatgatattattttatgttaaaccctaacattggtttcggattcaacgctataaataaaaccactctcgttgctgattccatttatcgttcttattgaccctagccgctacacacttttctgcgatatctctgaggtaagcgttaacgtacccttagatcgttctttttctttttcgtctgctgatcgttgctcatattatttcgatgattgttggattcgatgctctttgttgattgatcgttctgaaaattctgatctgttgtttagattttatcgattgttaatatcaacgtttcactgcttctaaacgataatttattcatgaaactattttcccattctgatcgatcttgttttgagattttaatttgttcgattgattgttggttggtggatctatatacgagtgaacttgttgatttgcgtatttaagatgtatgtcgatttgaattgtgattgggtaattctggagtagcataacaaatccagtgttccctttttctaagggtaattctcggattgtttgctttatatctcttgaaattgccgatttgattgaatttagcgcgcttagctcagatgatagagcaccacaatttttgtggtgagaaatcggtttgactccgatagcggctttttactatgattgttttgtgttaaagatgattttcataatggttatatatgtctactgttttttattgattcaatatttgattgttcttttttttgcagatttgttgacagtctctaaccaaacaaaatgtctcctgagagaagacctgttgagatggcct

SEQ ID NO: 119959 - DNA, 1324 bp, Arabidopsis thaliana
  misc_feature (1)..(1324): Ceres PROMOTER 15529D
gatcggccctttgtcttgatggctcatgaaaagcaagaaatctgcgattgaattttaaactgcttcaatgttccttcagtacatggtaaaagagtataagaagaaggatgtacatatgatgtctttgttttctggtttgcaactttcaggttccatttgagtctatggttcatcaagtgcgagaagagctaaaaacaatagcgaagggtgattacaagccaccttcggagaaaagaaaacacgggtctattgttttcgctgccatcaacttgcctgctactcaagttcacagtcttcttgaaaaggtaaccaaccaatttcttatactatcatataaaaaaacaaaaggaatattgagacaagaactcttcaactgccgaaaactaaaggttaagtatgggctttgttattaattaatagatgttattctcatcagttggctgcagcaaacccaacaatgagatcttttctagagggaaagaaaaagagcatacaggaaaaacttgaacggtctcacgtgacgctcgcccacaagagaagccatggcgtagcaactgtagccagctatagtcagcacttgaacagagaggtacccgtagagctcaccgagctcatctacaacgacaagatggctgctctaacagcccatgttggatctgtggacggagagaccgtagtctccaagaacgaatggccacatgttacattgtggacagcggaaggcgttactgcgaaagaggccaacacgttacctcagctttacttagaaggaaaggcgagccgcttggtgatagatcctccggtgtcaatctcaggtcctctggagtttttctgaatacttgattaaacatggaagtttctctcttgagggaggttgctcgtggaatgggacacatatggttgttataataaaccattccattgtcatgagattttgaggttaatatatactttacttgttcattattttatttggtgtttgaataaatgatataaatggctcttgataatctgcattcattgagatatcaaatatttactctagagaagagtgtcatatagattgatggtccacaatcaatgaaatttttgggagacgaacatgtataaccatttgcttgaataaccttaattaaaaggtgtgattaaatgatgtttgtaacatgtagtactaaacattcataaaacacaaccaacccaagaggtattgagtattcacggctaaacaggggcataatggtaatttaaagaatgatattattttatgttaaaccctaacattggtttcggattcaacgctataaataaaaccactctcgggcct

SEQ ID NO: 119960 - DNA, 1824 bp, Arabidopsis thaliana
  misc_feature (1)..(1824): Ceres PROMOTER 28716F
gatcggccggatgaacaaacacgaaactggtggattatacaaatgtcgccttatacatatatcggttattggccaaaagagctattttaccttatggataatggtgctactatggttggagttggaggtgtagttcaggcttcaccttctggtttaagccctccaatgggtaatggtaaatttccggcaaaaggtcctttgagatcagccatgttttccaatgttgatgtcttatattccaagtatgagaaaggtaaaataaatgcgtttcctatagtggagttgctagatagtagtagatgttatgggctacgaattggtaagagagttcgattttggactagtccactcggatactttttcaattatggtggtcctggaggaatctcttgtggagtttgatatttgcgagtataatctttgaacttgtgtagattgtacccaaaaccgaaaacatatcctatataaatttcattatgagagtaaaattgtttgttttatgtatcatttctcaactgtgattgagttgactattgaaaacatatcttagataagtttcgttatgagagttaatgatgattgatgacatacacactcctttatgatggtgattcaacgttttggagaaaatttatttataatctctcataaattctccgttattagttgaataaaatcttaaatgtctcctttaaccatagcaaaccaacttaaaaatttagattttaaagttaagatggatattgtgattcaacgattaattatcgtaatgcatattgattatgtaaaataaaatctaactaccggaatttattcaataactccattgtgtgactgcatttaaatatatgttttatgtcccattaattaggctgtaatttcgatttatcaatttatatactagtattaatttaattccatagatttatcaaagccaactcatgacggctagggttttccgtcaccttttcgatcatcaagagagtttttttataaaaaaatttatacaattatacaatttcttaaccaaacaacacataattataagctatttaacatttcaaattgaaaaaaaaaatgtatgagaattttgtggatccatttttgtaattctttgttgggtaaattcacaaccaaaaaaatagaaaggcccaaaacgcgtaagggcaaattagtaaaagtagaaccacaaagagaaagcgaaaaccctagacacctcgtagctataagtaccctcgagtcgaccaggattagggtgcgctctcatatttctcacattttcgtagccgcaagactcctttcagattcttacttgcaggttagatattttctctctttagtgtctccgatcttcatcttcttatgattattgtagctgtttagggtttagattcttagttttagctctatattgactgtgattatcgcttattctttgctgttgttatactgcttttgattctctagctttagatccgtttactcgtcgatcaatattgttcctattgagtctgatgtataatcctctgattaattgatagcgtttagttttgatatcgtcttcgcatgttttttatcatgtcgatctgtatctgctctggttatagttgattctgatgtatttggttggtgatgttccttagatttgatatacctgttgtctcgtggtttgatatgatagctcaactggtgatatgtggttttgtttcagtggatctgtgtttgattatattgttgacgttttggttgttgtatagttgatggttgatgtatttttgttgattctgatgtttcgatttttgtttttgttttgacagctggcct

SEQ ID NO: 119961 - DNA, 2016 bp, Arabidopsis thaliana
  misc_feature (1)..(2016): Ceres PROMOTER 32449F
gatcggccttcttcaggtcttctctgtagctctgttacttctatcacagttatcgggtatttgagaaaaaagagttagctaaaatgaatttctccatataatcatggtttactacaggtttacttgattcgcgttagctttatctgcatccaaagttttttccatgatgttatgtcatatgtgataccgttactatgtttataactttatacagtctggttcactggagtttctgtgattatgttgagtacatactcattcatcctttggtaactctcaagtttaggttgtttgaattgcctctgttgtgatacttattgtctattgcatcaatcttctaatgcaccaccctagactatttgaacaaagagctgtttcattcttaaacctctgtgtctccttgctaaatggtcatgctttaatgtcttcacctgtctttctcttctatagatatgtagtcttgctagatagttagttctacagctctcttttgtagtcttgttagagagttagttgagatattacctcttaaaagtatccttgaacgctttccggttatgaccaatttgttgtagctccttgtaagtagaacttactgggaccagcgagacagtttatgtgaatgttcatgcttaagtgtcgaacgtatctatctctactatagctctgtagtcttgttagacagttagttttatatctccatttttttgtagtcttgctagttgagatattacctcttctcttcaaagtatccttgaacgctcaccggttatgaaatctctacactatagctctgtagtcttgctagatagttagttctttagctctctttttgtagcctagttctttagctctccttttgtagccttgctacagagtaagatgggatattacctccttgaacgctctccggttatgaccaatttgttgtagctccttgtaagtagaacttaggatagagtgagtcaactttaagaaagaacctagtatgtggcataaccagattgcaggctctgtctcggctacagtaacgtaactctatagctctttgttttgttcagaaagaaccagtgattggatgattcgtccttagaaactggacctaacaacagtcattggctttgaaatcaagccacaacaatgcctatatgaaccgtccatttcatttatccgtttcaaaccagcccattacatttcgtcccattgataaccaaaagcggttcaatcagattatgttttaattttaccaaattctttatgaagtttaaattatactcacattaaaaggattattggataatgtaaaaattctgaacaattactgattttggaaaattaacaaatattctttgaaatagaagaaaaagcctttttccttttgacaacaacatataaaatcatactcccattaaaaagattttaatgtaaaattctgaatataagatattttttacaacaacaaccaaaaatatttatttttttccttttttacagcaacaagaaggaaaaacttttttttttgtcaagaaaaggggagattatgtaaacagataaaacagggaaaataactaaccgaactctcttaattaacatcttcaaataaggaaaattatgatccgcatatttaggaagatcaatgcattaaaacaacttgcacgtggaaagagagactatacgctccacacaagttgcactaatggtacctctcacaaaccaatcaaaatactgaataatgccaacgtgtacaaattagggttttacctcacaaccatcgaacattctcgaaacattttaaacagcctggcgccatagatctaaactctcatcgaccaatttttgaccgtccgatggaaactctagcctcaacccaaaactctatataaagaaatcttttccttcgttattgcttaccaaatacaaaccctagccgccttattcgtcttcttcgttctctagttttttcctcagtctctgttcttagatcccttgtagtttccaaatcttccgataaggcct

SEQ ID NO: 119962 - DNA, 1967 bp, Arabidopsis thaliana
  misc_feature (1)..(1967): Ceres PROMOTER 326F
gatcggccgtgggtaaaagtatccttctttgtgcatttggtatttttaagcatgtaataagaaaaaccaaaatagacggctggtatttaataaaaggagactaatgtatgtatagtatatgatttgtgtggaatataataaagttgtaaaatatagatgtgaagcgagtatctatcttttgactttcaaaggtgatcgatcgtgttctttgtgatagttttggtcgtcggtctacaagtcaacaaccaccttgaagttttcgcgtctcggtttcctcttcgcatctggtatccaatagcatacatataccagtgcggaaaatggcgaagactagtgggcttgaaccataaggtttggccccaatacggattccaaacaacaagcctagcgcagtcttttgggatgcataagactaaactgtcgcagtgatagacgtaagatatatcgacttgattggaatcgtctaagctaataagtttaccttgaccgtttatagttgcgtcaacgtccttatggagattgatgcccatcaaataaacctgaaaatccatcaccatgaccaccataaactcccttgctgccgctgctttggcttgagcaaggtgtttccttgtaaagctccgatctttggataaagtgttccactttttgcaagtagctctgacccctctcagagatgtcaccggaatcttagacagaacctcctctgccaaatcacttggaagatcggacaatgtcatcatttttgcaggtaatttctccttcgttgctgctttggcttgagcacggtgcttctttgtaaagctccgatctttggataagagcggatcggaatcctctaggaggtgccagtcccttgacctattaatttatagaaggttttagtgtattttgttccaatttcttctctaacttaacaaataacaactgcctcatagtcatgggcttcaaattttatcgcttggtgtatttcgttatttgcaaggccttggcccattttgagcccaataactaaatctagccttttcagaccggacatgaacttcgcatattggcgtaactgtgcagttttacctttttcggatcagacaagatcagatttagaccacccaacaatagtcagtcatatttgacaacctaagctagccgacactactaaaaagcaaacaaaagaagaattctatgttgtcattttaccggtggcaagtggacccttctataaaagagtaaagagacagcctgtgtgtgtataatctctaattatgttcaccgacacaatcacacaaacccttctctaatcacacaacttcttcatgatttacgacattaattatcattaactctttaaattcactttacatgctcaaaaatatctaatttgcagcattaatttgagtaccgataactattattataatcgtcgtgattcgcaatcttcttcattagatgctgtcaagttgtactcgcacgcggtggtccagtgaagcaaatccaacggtttaaaaccttcttacatttctagatctaatctgaaccgtcagatatctagatctcattgtctgaacacagttagatgaaactgggaatgaatctggacgaaattacgatcttacaccaaccccctcgacgagctcgtatatataaagcttatacgctcctccttcaccttcgtactactactaccaccacatttctttagctcaaccttcattactaatctccttttaaggtatgttcacttttcttcgattcatactttctcaagattcctgcatttctgtagaatttgaaccaagtgtcgatttttgtttgagagaagtgttgatttatagatctggttattgaatctagattccaatttttaattgattcgagtttgttatgtgtgtttatactacttctcattgatcttgtttgatttctctgctctgtattaggtttctttcgtgaatcagatcggaaggcct

SEQ ID NO: 119963 - DNA, 1552 bp, Arabidopsis thaliana
  misc_feature (1)..(1552): Ceres PROMOTER 34414F
gatcggccaagcttatgtcaaaaatatttaattaaaatatatgtaatttatatgttgattgagttatgagtatcaagtaaaaaccctaatccgttattaaaatatcaatgattataacgtatttataaacgaaaaaaaaaagaacatctagaattttcgatatttgatcctcaagttaaacttggaaaaatttggatgtatgaaatattttgtcgtccacttatacaataaagtatgaaacatggatgcatgaaggctagacatccaatgtctaaaaatactatatataatgcttttggtagggtcttttctttatcatgtctcacttctgtttctatccctcattttaaatagccaatataatttcactctttactataaaattattatataaacatcattttgattgaactacctaaaaggaagaaacgtataggaatttttggagcctcaagattgtaataatgtctcatagtttgacttgcaaaagctaaattaaacgcctaaatcattaccattaaataaatgaacttttgtacgcaattgattcagacacaaggaccgaccaattcgaaaacaatgaatggatatgattcatccttatgaaagcttgacaacaaactcggttttggctggttaacctagactcggtttatttaaaccagacaataatttctttcgtcgtcgttttatttgaataggtgcgtcaaaaataaaagctgaaattcttggttgcaaaagcccaacaggcctgtggagatagctttttagattgattaaatgggccgaattgggctgacacatgacgagaatgtggctatagaaattgttagtgagagggtccgggtccaaaaatgttgcagaagtgatatagtatttatttaattaaaaacatattattcgacgtatttttaacgctcactggatttataagtagagattttttgtgtctcacaaaaacaaaaaaatcatcgtgaaacgttcgaaggccattttctttggacgaccatcggcgttaaggagagagcttagatctcgtgccgtcgtgcgacgttgttttccggtacgtttattcctgttgattccttctctgtctctctcgattcactgctacttctgtttggattcctttcgcgcgatctctggatccgtgcgttattcattggctcgtcgttttcagatctgttgcgtttcttctgttttctgttatgagtggatgcgttttcttgtgattcgcttgtttgtaatgctggatctgtatctgcgtcgtgggaattcaaagtgatagtagttgatattttttccagatcaggcatgttctcgtataatcaggtctaatggttgatgattctgcggaattatagatctaagatcttgattgatttagatttgaggatatgaatgagattcgtaggtccacaaaggtcttgttatctctgctgctagatagatgattatccaattgcgtttcgtagttatttttatggattcaaggaattgcgtgtaattgagagttttactctgttttgtgaacaggcttgatcaaaggcct

SEQ ID NO: 119964 - DNA, 1694 bp, Arabidopsis thaliana
  misc_feature (1)..(1694): Ceres PROMOTER 326D
gatcggccgtgggtaaaagtatccttctttgtgcatttggtatttttaagcatgtaataagaaaaaccaaaatagacggctggtatttaataaaaggagactaatgtatgtatagtatatgatttgtgtggaatataataaagttgtaaaatatagatgtgaagcgagtatctatcttttgactttcaaaggtgatcgatcgtgttctttgtgatagttttggtcgtcggtctacaagtcaacaaccaccttgaagttttcgcgtctcggtttcctcttcgcatctggtatccaatagcatacatataccagtgcggaaaatggcgaagactagtgggcttgaaccataaggtttggccccaatacggattccaaacaacaagcctagcgcagtcttttgggatgcataagactaaactgtcgcagtgatagacgtaagatatatcgacttgattggaatcgtctaagctaataagtttaccttgaccgtttatagttgcgtcaacgtccttatggagattgatgcccatcaaataaacctgaaaatccatcaccatgaccaccataaactcccttgctgccgctgctttggcttgagcaaggtgtttccttgtaaagctccgatctttggataaagtgttccactttttgcaagtagctctgacccctctcagagatgtcaccggaatcttagacagaacctcctctgccaaatcacttggaagatcggacaatgtcatcatttttgcaggtaatttctccttcgttgctgctttggcttgagcacggtgcttctttgtaaagctccgatctttggataagagcggatcggaatcctctaggaggtgccagtcccttgacctattaatttatagaaggttttagtgtattttgttccaatttcttctctaacttaacaaataacaactgcctcatagtcatgggcttcaaattttatcgcttggtgtatttcgttatttgcaaggccttggcccattttgagcccaataactaaatctagccttttcagaccggacatgaacttcgcatattggcgtaactgtgcagttttacctttttcggatcagacaagatcagatttagaccacccaacaatagtcagtcatatttgacaacctaagctagccgacactactaaaaagcaaacaaaagaagaattctatgttgtcattttaccggtggcaagtggacccttctataaaagagtaaagagacagcctgtgtgtgtataatctctaattatgttcaccgacacaatcacacaaacccttctctaatcacacaacttcttcatgatttacgacattaattatcattaactctttaaattcactttacatgctcaaaaatatctaatttgcagcattaatttgagtaccgataactattattataatcgtcgtgattcgcaatcttcttcattagatgctgtcaagttgtactcgcacgcggtggtccagtgaagcaaatccaacggtttaaaaccttcttacatttctagatctaatctgaaccgtcagatatctagatctcattgtctgaacacagttagatgaaactgggaatgaatctggacgaaattacgatcttacaccaaccccctcgacgagctcgtatatataaagcttatacgctcctccttcaccttcgtactactactaccaccacggcct

SEQ ID NO: 119965 - DNA, 1408 bp, Arabidopsis thaliana
  misc_feature (1)..(1408): Ceres PROMOTER 13879D
gacgcaggcccgatcggccgtgtgagttggtagcgaattaacggaaagtctaagtcaagattttttaaaaagaaatttatgtgtgaaaagaagccgttgtgtatatttatataatttagaaaatgtttcatcattttattaaaaaattaataatttgtagaagaaagaagcattttttatacataaatcatttaccttctttactgtgtttttcttcacttacttcatttttacttttttacaaaaaagtgaaaagtaaattacgtaattggtaacataaattcactttaaatttgcatatgttttgttttcttcggaaactatatcgaaaagcaaacggaaagaacttcacaaaaaaccctagctaactaaagacgcatgtgttcttcttattcttcatatatcctctgtttcttgtgttctgttttgagtcttacattttcaatatctgactctgattactatatctaaaagggaacatgaagaacttgagaccatgttaaactgtacaatgccttcaaacatggctaactaaagatacattagatggctttacagtgtgtaatgcttattatctttaggttttttaaatcccttgtattaagttatttaccaaattatgttcttgtactgcttattggcttggttgttgtgtgctttgtaaacaacacctttggctttatttcatcctttgtaaacctactggtctttgttcagctcctcttggaagtgagtttgtatgcctggaacgggttttaatggagtgtttatcgacaaaaaaaaaatgtagcttttgaaatcacagagagtagttttatattcaaattacatgcatgcaactaagtagcaacaaagttgatatggccgagttggtctaaggcgccagattaaggttctggtccgaaagggcgtgggttcaaatcccactgtcaacattctctttttctcaaattaatatttttctgcctcaatggttcaggcccaattatactagactactatcgcgactaaaatagggactagccgaattgatccggcccagtatcagttgtgtatcaccacgttatttcaaatttcaaactaagggataaagatgtcatttgacatatgagatatttttttgctccactgagatatttttctttgtcccaagataaaatatcttttctcgcatcgtcgtctttccatttgcgcattaaaccaaaaagtgtcacgtgatatgtccccaaccactacgaattttaactacagatttaaccatggttaaaccagaattcacgtaaaccgactctaaacctagaaaatatctaaaccttggttaatatctcagcccccttataaataacgagacttcgtctacatcgttctacacatctcactgctcactacggcctgcagggccaatctc

SEQ ID NO: 119966 - DNA, 1960 bp, Arabidopsis thaliana
  misc_feature (1)..(1960): Ceres PROMOTER 32449D
gacgcaggcccgatcggccttcttcaggtcttctctgtagctctgttacttctatcacagttatcgggtatttgagaaaaaagagttagctaaaatgaatttctccatataatcatggtttactacaggtttacttgattcgcgttagctttatctgcatccaaagttttttccatgatgttatgtcatatgtgataccgttactatgtttataactttatacagtctggttcactggagtttctgtgattatgttgagtacatactcattcatcctttggtaactctcaagtttaggttgtttgaattgcctctgttgtgatacttattgtctattgcatcaatcttctaatgcaccaccctagactatttgaacaaagagctgtttcattcttaaacctctgtgtctccttgctaaatggtcatgctttaatgtcttcacctgtctttctcttctatagatatgtagtcttgctagatagttagttctacagctctcttttgtagtcttgttagagagttagttgagatattacctcttaaaagtatccttgaacgctttccggttatgaccaatttgttgtagctccttgtaagtagaacttactgggaccagcgagacagtttatgtgaatgttcatgcttaagtgtcgaacgtatctatctctactatagctctgtagtcttgttagacagttagttttatatctccatttttttgtagtcttgctagttgagatattacctcttctcttcaaagtatccttgaacgctcaccggttatgaaatctctacactatagctctgtagtcttgctagatagttagttctttagctctctttttgtagcctagttctttagctctccttttgtagccttgctacagagtaagatgggatattacctccttgaacgctctccggttatgaccaatttgttgtagctccttgtaagtagaacttaggatagagtgagtcaactttaagaaagaacctagtatgtggcataaccagattgcaggctctgtctcggctacagtaacgtaactctatagctctttgttttgttcagaaagaaccagtgattggatgattcgtccttagaaactggacctaacaacagtcattggctttgaaatcaagccacaacaatgcctatatgaaccgtccatttcatttatccgtttcaaaccagcccattacatttcgtcccattgataaccaaaagcggttcaatcagattatgttttaattttaccaaattctttatgaagtttaaattatactcacattaaaaggattattggataatgtaaaaattctgaacaattactgattttggaaaattaacaaatattctttgaaatagaagaaaaagcctttttccttttgacaacaacatataaaatcatactcccattaaaaagattttaatgtaaaattctgaatataagatattttttacaacaacaaccaaaaatatttatttttttccttttttacagcaacaagaaggaaaaacttttttttttgtcaagaaaaggggagattatgtaaacagataaaacagggaaaataactaaccgaactctcttaattaacatcttcaaataaggaaaattatgatccgcatatttaggaagatcaatgcattaaaacaacttgcacgtggaaagagagactatacgctccacacaagttgcactaatggtacctctcacaaaccaatcaaaatactgaataatgccaacgtgtacaaattagggttttacctcacaaccatcgaacattctcgaaacattttaaacagcctggcgccatagatctaaactctcatcgaccaatttttgaccgtccgatggaaactctagcctcaacccaaaactctatataaagaaatcttttccttcgttattgcttaccaaatacaaaccctagccgggcctgcagggccaatctc
